United States Patent Application Publication US 2005/0084872 A1 - sequence listing, part 2

SEQ ID NO: 2762 - DNA, 574 bp, Mus musculus
  misc_feature 364, 370, 371, 431, 498, 533, 551: n = A,T,C or G
cttaactgtttttattagagcggtggctccgattatttctacatagatcacatccaggtccacagctcaagagagcaatgtatgtgttggaattaagtgaagtaaacacctgtagcccttaaggttgttaatctcacaaacccacaccagcactttaaaaagagccaccattcaggaagtgtacacagaacctatgaagtagagatgagaatccctggactcacacagcagctcagcatttccaaagcaaggaactgtgcagcccagctgggttttggccctcgattcccttttcctggaaagttttataatcatcacgatcaccgtgctcatctaatgttcttctctttcacttacctctcanagcagnngtgagcatctgtacttgcctggtctttctttcactccacactgtataagtatggggtctncataacaactcaccagcttccgaaggctcactttgcttcagggttgtctctaagtcccactcatgcncaaggtgggtttttcttctcatagaccaacttggnggaatgatctaaggtctntatctgccagagatcctcagggg

SEQ ID NO: 2763 - DNA, 498 bp, Mus musculus
tctggcttaaaagtttatttactggcatggagaaatgtttgggatacattgctatataatgaaaacattaaattttcaatataaaacttcttctggtagaaagatacatacaaaccaaagtattaacaatgacaggctgagcggggtgaatttgaagaattacttgtgttttcgttggttttgtggctcagcagttaagagcaccagctgctcttccagaggtcctgaattcaagtcccagcaaactcaaagcccagcgggaggtaaccagtcatgaagaagctaagagagcacaagacaggcggcatatgagaggggcagccacctgtacaggcaagctcatctgttttcaccaaccacataccaaaatgagcgtaagctttcttgttatagttctgaggaacaacacttttatacatgtaataatggaactcttagagtctaaaacatcaaaaggatctttggagggccttttaaacactccttcagagtcacaga

SEQ ID NO: 2764 - DNA, 3071 bp, Mus musculus
tcccgccagcagcctgcgacctacactcgcagcagctcttccgaactccacgtagcagtgctggggagtctgggtctcaggacctgggagctccggtgggtctgcaggatcggatttgcccagtcccggcgggagatggccttgcggctgggcccgctgggttcggacccctggtggcgagcggtgctgggcgactatctcagctgcgcgccgcgtccccgcgctgcgcgtccgcccgcgtctgccagctgcctggcacgctggtccccagcctcgccgcgggctgggctacggcccctgggctagaggcgggtccgggctggggacccggctggccgcgacgctggcggggttggcagtggctggcagccgccgcctttgggcacgtgcagcgggcggagatggtgcccaagagctcgggggcgcggagcccctcacctggacggcgggaggaggacggggacgagctggcccgccgctgcagcaccttcatgtcctcgccggtgaccgagctgcgggagctgcggaggaggccggaggacatgaagaccaagatggagctgatgattatggagacccaggctcaggtgtgtcgggcactggcgcaggtagatggcgttgccgacttcactgtggaccggtgggagaggaaagaaggaggaggtggcatcacctgtgtgcttcaggacgggcgtgtgtttgaaaaggccggggtgagcatttccgtcgttcatgggaatctttctgaggaagcagcgaaccaaatgagaggcagaggcaaaactctgaagacgaaagatagtaaattgccatttactgctatgggtgtaagttctgtgattcaccccaagaatccttatgcgcccaccatgcatttcaactacagatactttgaagtagaggaagctgacggtaacacacactggtggtttgggggtggctgtgacctcacaccgagatacttgaaccaagaggatgctgtccatttccaccgtactctaaaggaagcttgcgatcagcatgggccagacatctacccaaagtttaaaaaatggtgtgacgactacttctttatagttcaccgcggggagcggaggggcatcggcggcatcttttttgacgatcttgactccccctccaaggaggaggctttccgcttcgtgaagacgtgtgctgaggctgtggtcccttcctatgttcccattgtgaagaagcactgcgatgactcctacacccccagggacaagctgtggcagcagctgaggagagggcggtatgtggagtttaatctgttgtatgatcggggcaccaagtttggcctctttactccaggatccaggatcgaaagtatcttgatgtctttacctctaacagcaagatgggagtacatgcattctcccccagagaattccaaagaagctgaaattctggaagtgttgcgccatccaaaggactgggtgcactgatgcatcagacagagccttgctccagggcctggtggacacaggtggtgtcttcgtgcactgtggccactgtgtcgaggcagtgtcttccgtgccttactgtccccgccttcttcaccctgggcaccccgtctgtggcaggcggttttgatcttttccagtgctgtgggaggaggtggctcagaggtgggtggggatgtcaaactgtcagattccttgtctgtgacatccatttgtacttttagaataattttctatgaccagtcagtttgacattgtgtttccaggtctttgagataagggaatgtaaatactatgataggtaccaggaaactcttcattttatatgttgcttgaagttttagtttttgctacagaagtttatcagggaatacattttatcttcattagttcagtcaggatgcccttcttgggaactttggaatgcaatttgaagccagtccgtggtgatgtttgcctttaatctcagtattcaggaagcagaggctggtggatctctgtgattttgaggccaggctattctacaaagggagttctagtccagccagggctacacagagaaaccctgtcttgaaaaagaaccaaccccgccccccgaaaaaaaaaaacggcaaaaaagaaaggaaggaagaaagaaagaaagcaatttggagaaacatgtttttctttgttgcgtttgaaggttctttgacgtaattttcatgtatctttctctatattccagaatattataaaaaaatactcattttttttttaaagatagctatttaagagctctggaaattttctttagtcagtttttgtattatataatgatgacctagtttacaactgcagatggcattattattatttaaataagtgatatcttcagtggtaaggtttttgtgagatcataattagctaacattaggattctatgtaattttgaaagtgaaagcttatatccctggattctgatacttaaaagttttatattttagagacttagatatgggagattagcctaaggacaaatgaaacacattttttttgctctttaattcaaagagaatcggagtctaacctgggcattttatatttttttatttaaaaaatgggccaatagaaattgtgttactttttaaattagagattcttcaacttttatcttttcttttaaaagtcacagcagatttctttttctttctttttttttaaaaattaggtattttctttatttacatttcaaatgctttcccaaaagtccccgatacccccccgccactcccctacccacccactcccacttcttggcccggcgttcccccgtactggggcatataaagtttgcaagaccaaggggcctctcttcccaatgatggccgactaggacatcttctgctacatatgcagccgatttcttaatgtgtggtttacttgtctaaataatagtctgactgcgctatgttacttgatttataatatattgaatttgtaaagaacaatatttaaatattatcctggaatatgttggatgtatgtgattgtgtttgccacttttagggtaagaaaatctacagattcaacatgtcttacatagattca

SEQ ID NO: 2765 - DNA, 1328 bp, Mus musculus
  misc_feature 35: n = A,T,C or G
gaagccgccgatcctcgtgtgcaaggcgaggtctngtatactggagcggggcagaggctggcgggcacccctcctgaccgctggtgccgccgccgccgccttcgggaggatcagacatggcccagaacttgaaggacttagctggacgcctgcccgccgggcctcggggcatgggcacggcgctgaagctgctgctgggggccggggcggtggcctacggcgtccgcgaatccgtgttcaccgtggaaggcggtcatagagccatcttttttaatcgtattggtggcgtgcagcaggacacgatcctggccgaagcttacacttcaggatctcctggttccagtaccccatcatctatgacattcgggccagacctcgaaaaatctcctcccccacaggctccaaagacctgcagatggtgaacatctccctgcgtgtgctgtcccgacccaatgcccaggagctccccagcatgtaccagcgtctagggctggactatgaggagcgagtgctgccgtccattgttaatgaggtgctcaagagtgtggtggccaagttcaatgcctcgcagctgatcacccagcgggctcaggtgtccctgttgatccgaagagagctgacagagcgcgccaaggacttcagcctcatcctggatgatgtagctatcacagagctgagcttcagccgagagtacacagctgctgtagaagccaagcaagtggcccagcaggaagcccagcgggcccagtttttggtggagaaagcgaagcaggaacagcgacagaagattgtgcaggctgagggggaggcggaggctgccaagatgcttggagaagcactgagcaagaatcctggctatatcaagctccgaaagatccgggccgcccagaacatctctaaaacgatcgccacatcacagaaccgaatctatctcacagctgacaaccttgtgctgaatctacaggatgaaagttttactcggggaagtgacaccctcattaagggtaagaaatgagtgtggacatcaagaaccccaccaccagagaagttggcacacttgtccagcttggaggagccagctcgggggtcaagcacagcccaccctgccccaggcatcatgtgatggacttttctgtatctgccctcttggattaaggaagactgagaccagccctttcagaggctttcctccttcctgtgttggctgggaagcggggtgggacaatgtgatttctccgtgatttcctacagccttgagcctctcccagagtgggggagataaccaccatgccaggaattctcaataaaatttttattacttaaagcct

SEQ ID NO: 2766 - DNA, 455 bp, Mus musculus
  misc_feature 115, 118, 123, 125, 129, 133, 135, 139, 154, 162, 424, 438: n = A,T,C or G
ttttgctaaacagttctttttatttctctgaaattcagatgcacagtttcattccagggaaaaaagattccagatgaagtgaccatttctatcgagttctttgcttataccattnttnaaaangncgtnattntncagnttatagaaacttttnaagtaganacacacacacacacacacacgaagagagagagagagagagagagagagagagagagagatcaggcagaatgtgcagaacatggaacttacacttccagacctgcacctcgttcttgtagcaaaaacagcagtaaatgggtgagcacagcttgttagctccccatttgttagcaggatgaacaaatcctgcagcttaaagcggacagaaattggtaaattaacccataatctatctgttcaatccaagatgctatggaggatntctgctctcagttntactgagctacttttgc

SEQ ID NO: 2767 - DNA, 510 bp, Mus musculus
  misc_feature 411, 475: n = A,T,C or G
catatttgaacactttaatttgcaatgactttatccttcaggatcttttacattgacttcagaaactatataacagagaactttcagccttgggcaattagagaacagaagctgtgataagaaggaatatagatggaatttctgggactgggttaaatgagggcttccatgggcgattgagaaaaacagcatagcagaagctttcctcatcttcatttctatttatcatcttcattccacagggatgaagcacatctggaatttgggaggaattttagaaaatccagaatatttggggggtcgtatcgatgtcctttggatcaaccagaggtttcagtttgaaattttgtaaatgggtggtcaggaatagaaacagctccatgcggggcaaggctctcttccacaccaatnccgtttttctgctgagaaaggccccaagtagtcacttttcttaaaggttccatttgggctttanaaaaggggcccggggtcaaacacctttgggttggg

SEQ ID NO: 2768 - DNA, 599 bp, Mus musculus
  misc_feature 456, 457, 458, 459, 460, 461, 462, 463, 464, 465, 466, 467: n = A,T,C or G
agaatatttgaactctaagctctttgagctgtacacgtgcacaaatgattcagttggtggaaaccttccccttcccctccatttaaaaacgtttcaaacttaaaagagcgctaaagaggtttgcataatgagcatcatggaagtgtccaggtgactttctcgatgctgggaggtcccgtggcttccccattccttctggggaaagctccccctcccccgtccccatgctcaatctagcgcgagaaccccttgatctgtagcaggttaacgtcaacagatggcaatacagtttactaagactaatcatctgggccgtctagaacactgagttcttaaggactatgcaaggtagtcacactcaacttttactaaattagacatttctgctatcattgtttggaagcgcaaattatttcccagactttcattttgtttctctctctctctctctctttnnnnnnnnnnnntctctctctctctctctcctgcatcctgaaagttaatgtggattagaaggtcagcccctggtagttgactgttgtaatcaatccatctatacaaccgatttcactgtttctgccacgagagggcatcatctc

SEQ ID NO: 2769 - DNA, 485 bp, Mus musculus
  misc_feature 357: n = A,T,C or G
tttttttttttttttttgcagaaattaacttttttttttattatatatcatataatgtagtagtaaagtttgtttgaagtgcatgaataaaaagttagtgaaattacaggaggaacaatctatatagcaataattggtgcattccctgtgcatctgaaagaaaaaaaaaaagagttttcactcatattttggcctaaaacttagtgttcaggttcccaagattctgacatcagaacccggataacgctgattagaaccataggggctttacaataaaagctaaaatattgaccatatgatggcaaaaagtcttattttgtggttaacttattctcttctagctactctctgatgaanttggtggcgctgtggaggaggaccgccgcctcctggacgaggaccgggagcgctcagcattgtaggagacatgcttgtcgtagttctccatctgtgtctcaatgaagtccctttgctgctgtctgatg

SEQ ID NO: 2770 - DNA, 1276 bp, Mus musculus
ccgctgcccggccgcccgccatattggttcttctgccccagtcgctccctcttggaagcgctctcgacgttccggagtctctggccttcttcctgccctggttgcacccaggcgtgttggcgagccgcccccaggacgtccagtgtgtgtctgcaagataatgatgcttgaactgaactactaaggattcgaaatcaaaacttacattattaataatggcaggaaaatcgtctctttttaaaataattcttcttggagatggtggagttggcaagagttctcttatgaacagatatgtaaccaataaatttgattcccagctcttccacacaataggtgtggaatttttaaataaagatctggaggtggacggacattttgttaccatgcagatttgggacacagctggccaagaacgcttccgaagcctgaggacgccattttaccggggttctgactgttgcctgcttacatttagtgtcgatgattcacagagcttccagaatttgagcaactggaagaaagagttcatatattacgcagatgtgaaagagcctgaaagctttccctttgtgattttgggcaacaagactgacataaaagaacggcaggtgtctacagaagaagcccaagcctggtgcaaggacaacggcgactatccttactttgaaacaagtgcaaaagattccaccaatgttgctgctgcctttgaggaggcagttcgaagaattctggccacggaagataggtcagaacacctgattcagacagacacagtcaatctgcaccgaaagcccaagccaaactcatcttgctgttgatggcattaaagggatagttggtgcattctaaccaacacacacacacacacacagaaaggtggagaaacaaattagtatgcagaagagttcatttactaataaaattcagttaacgcatattgttgcctcattagtcggtgggagaagggacactcactctggaggaatctatttactcagtaatggcacgttccacttataaattgtaattgttgtctaatgtttctttaaattaaaacattagtgctaataagatgaccaagaactgactttactgtaattcagacgacaaccttggctattctagaagtacacttagattgttttgacccacaaggaaatggaaaattacttttatatgtgtatatttttatgtaattagcattgtattcttggtctaggaaagtaaattcctacagcagtactattaaagattaaaatctaatgcaaaaaaa

SEQ ID NO: 2771 - DNA, 1508 bp, Mus musculus
gagggaccgtcggtgttgcgagccgcgggcgcccggaggccgtagcgcacggggcatccgggtagactggcagcatggggaagggaggtaaccagggagaggggagcaccgagcgccaggctccgatgcccaccttccgttgggaggagattcagaagcacaacctgcgcaccgaccggtggctcgtcatcgaccgcaaggtctacaacgttaccaaatggtcccagcggcacccggggggccaccgtgtcatcggacactattcgggagaagatgctacggatgccttccgtgccttccatctggacctggacttcgtgggcaagttcttgaagcccctgctgattggtgagctggccccagaggagcccagcctggaccgtggcaaaagctctcagatcaccgaggacttcagggccctgaagaagactgctgaggacatgaacctcttcaaaaccaaccacctgttcttctttctcctcctgtcccacatcatcgtcatggaaagccttgcctggttcatcctctcgtacttcggcactggctggattcctaccctcgtcacagcctttgtcctcgctacctctcaggcccaagctggatggctgcaacatgactatggccacctttctgtctataagaaatccatatggaaccacgttgtccacaagtttgtcattggccacttaaagggtgcctcagccaactggtggaaccaccgacatttccaacaccatgccaagcccaacatcttccacaaggacccggacataaagagcctgcatgtgtttgtccttggcgagtggcagccccttgagtatggcaagaagaagctgaaatacctgccctacaaccaccagcatgaatacttcttcctgatcggaccgccgctgctcatccctatgtacttccagtaccagatcatcatgacaatgatcagccgcagggactgggtggacttggcttgggccatcagctactatatgcgtttcttctacacctacatccctttctacggcatcttgggagccctggttttcctcaactttatcaggttcctggagagccactggtttgtgtgggtcacacagatgaaccaccttgtcatggagattgatcttgatcactaccgggactggttcagcagccagctggcagccacctgcaatgtggagcagtccttcttcaatgactggttcagcgggcacctcaatttccagattgagcaccacctcttccccactatgccacgtcacaacctgcacaagattgccccactggtgaagtctctctgcgccaagcatggcattgaataccaggagaagccgttgctgagggccctgatcgacattgtgagttcactgaagaagtctggggagctgtggctggatgcttacctccataaatgaagctgccgtcctccgggcaccctcgggaaaggggcactgttgggtgacagccagagggaggggagggcttttgttctgaagggttctcatgagactgaa

SEQ ID NO: 2772 - DNA, 522 bp, Mus musculus
ctcccctgtcagagtctccctcgagcctcgatgccgattgtctgctttgaccctccgtatgagttatacttacattggcccctggctggggaagtgcaatcccagtactgggggactggagacagggggatttctggtgctcactggccagcaccaggttcactgagagaggctgtctcagagaagaaaaagatcatcaagaaagacacctgacatgaaccactggcttccatagcacaggcacacgcacaggcacacgcacaggcacacgtacaacccaggagttctagctagttctgctgctttagctcagtggcagagttcttaacatgcccatgcgtgtcaccacacacatattcatgcaaatagaaaaagtagagaaaattaaagttatcaaaaatctcttcaaaccacatctgaacattagtcccctttcacctcctatatagtcaagatttttactaggctgtcaatgaaagtcaaccaataaaaatctctaaacacctcaaaaaaaaaaaaaaa

SEQ ID NO: 2773 - DNA, 1296 bp, Mus musculus
gaattccgggcccagcagaggttttctacaatccctcctgctcccctggccaaaacagatacatggccaaaagatgtgggcatccttgccctggaggtctattttccagcccaatatgtggaccaaactgacctggaaaagttcaacaatgtggaagcagggaagtatacagtgggcttgggccagacccgtatgggcttctgttcagtccaggaggacatcaactccctgtgcctgacagtggtacagaggctgatggaacgcacaaagctgccgtgggatgctgtgggccgtctggaagtgggcaccgagaccatcattgacaagtccaaggctgtcaaaacagtgctcatggaactgttccaggattcaggcaacactgacatcgagggcatagataccaccaacgcctgttatggcggcacagcctccctcttcaatgctgccaactggatggagtccagctactgggatggtcgctatgccctggtggtctgtggtgacattgcagtctacccgagtggtaacgcccgccccacaggtggtgctggggctgtggcaatgctgatcgggcccaaggcccctctggtcctcgagcaagggctgaggggaactcacatggagaacgcgtacgacttctacaaaccaaacttggcctcagagtatccactggtggatgggaagctgtctatccagtgctacctgcgggccttggatcgatgctatgcagcctaccgcaagaagatccagaatcagtggaagcaagctggaaacaaccagcctttcaccctcgatgatgtgcagtatatgatcttccacacacccttttgcaagatggtccagaaatccctggctcggttgatgttcaatgacttcctgtcatccagcagtgacaaacagaacaacttatacaagggcctagaggccttcaggggtctaaagctggaagaaacctacaccaacaaggatgtagacaaggctcttttgaaggcctccctggacatgttcaaccagaagaccaaggcctccctttacctctccacaaataatgggaacatgtacacctcttccctctatggctgcctggcctcacttctctctcaccactctgcccaagaattggctggctccaggattggagccttctcctacggctcaggcttagcagcaagtttcttttcattccgagtgtccaaggatgcttccccaggttcccccctggagaaactggtgtctagtgtgtcagatctgcccaaacgtctagactcccggagacgcatgtcccctgaggaattc

SEQ ID NO: 2774 - DNA, 4040 bp, Mus musculus
agattttaaaaacaaaaaagcataaatattctggtccttcagcaatgctttctctgaagaaatatttaacggaaggacttctccagttcaccatcctgctgagtctgattggggttcgggtggacgtggatacttacctgacctcacagctcccccctctccgggagatcatcctggggcccagctctgcctatacccagacccagttccacaacctgaggaataccttggatggctatgggatccaccccaagagcatagacctggacaattacttcactgcccggcggctccttagtcaggtgagggccctggataggttccaggtgcctaccactgaggtcaatgcttggctggtccaccgagacccggaggggtctgtctctggcagccagcccaactcaggcctcgccctcgagagttccagtggcctccaagatgtgacaggcccagacaacggggtgagagaaagcgaaacggagcagggattcggtgaagatttggaggacctgggggctgtagcccctcctgtcagtggagacttaaccaaagaggatatagatctgattgacatcctttggcgacaggatattgatctgggggctgggcgtgaggtttttgactacagtcatcgccagaaggagcaggatgtggataaggaactgcaagatggacgagaacgagaggacacctggtcaggcgagggtgcggaagctctggcccgagacctgctagtagatggagagactggggagagcttccctgcacagttcccagctgacgtttccagcatcccagaagcagtgcctagtgagagtgagtcccccgcccttcagaacagccttctatctcctcttctgacggggacagaatcaccatttgatttggaacagcagtggcaagatctcatgtccatcatggaaatgcaggctatggaagtaaatacatcagcaagtgagattctatacaatgcccctcctggagaccctcttagctccaactacagccttgcacccaacactcccatcaatcagaatgtcagcctgcatcaggcgtccctggggggctgcagtcaggacttctccctcttcagccccgaggtggagagcctgcctgtggctagcagctccacactgcttccactcgtccccagcaactccaccagtctcaactccacctttggctctaccaacctagcagggcctttctttccatcccagctcaatggcacagccaatgacacatcaggccctgagctacctgacccccttgggggcctgttagacgaagctatgctggatgagatcagcctgatggacctggccattgaggagggcttcaacccggtgcaggcttcccagctcgaagaggagtttgactctgactcaggcctctccttggactccagccatagcccttcctctctgagcagctctgaagggagctcttcttcttcctcctcctcctcttcctcttctgcttcctcctctgcctcttcttccttctctgaggagggtgctgttggttacagctctgactctgagaccctagacctagaagaggctgagggtgcagtgggctaccagccggaatactccaagttctgccgcatgagctatcaggatccttctcagctctcttgccttccctacttagagcatgtgggccacaatcatacatacaatatggcacccagtgcccttgactctgctgatctaccaccacccagcaccctcaagaaaggtagcaaggaaaagcaggctgacttcctggacaagcagatgagccgagatgagcacagagcccgagccatgaagatcccattcaccaatgacaagatcatcaacctgcctgtagaagaattcaatgagctgctgtccaaataccagctgagcgaggcccagctcagcctcatccgggatatccggcgccggggcaaaaacaagatggctgcacagaactgccgcaagcgcaagttggacaccatcctaaacctagaacgtgatgtggaggacttgcagcgagataaggcccgattgcttcgagaaaaggtagagttccttcggtctctgcgacagatgaagcagaaggtccaaagcttataccaggaggtgtttgggcggctgcgggatgagcatgggaggccctactcacccagtcagtatgcccttcagtatgctggggatggcagtgtcctcctcattcctcgcacgatggctgaccagcaggctcggcgacaggagagaaagccaaaggaccggaggaagtgagcctggggaggcagggggtggacgctcactaagaccgaaactggagaagggctgggcctggacctaacattggggacttaaatgccttcttatccaatatatcttctcagatgggatgactgcgggtcagtgcaccgaagaggcgggcgcaggcgctgtctggctcagctgcccccttggggtgggcagggaggaccagactgcttgggtgattggggtccccagcctattccctttctcttgaggggagggtagtgtcggcatgctggaagtagaggagctgtgtggagtgaaggagagaaagtgtgggagatctcattgctggaaggagaaaaggaaggaatcccccgaaaatcaaagcagtcagaaaaaccagagcgactgttaagggctttggccagctttctaggcagcgagtgcaggtgacaacggtggtctagggagagttactggtatggaacacagacatgcgggccccagaaggcctttgtaactgtttcttcaactcttgcatcctgaagggaagatgctcttggatgcacctgtaatatcttagttactgaatgggaagctgtaggggccgaggagggcagagggtataggaagtgagaacgaggcctgtgtcgcagcagcccagcatcaagcatgtcacacactgccctgccacagccacctcccttcctggccatcccagagccgaggctcccactgtcctcagagagcctgcatggaaatgctgtcctcttccactctcctcctctttttgatacccaccctcactagctgcctccagctctggagtggggtgctattctggcagtatctggaacttggcctacagcttcctctgcagggtctaaacagggaaggcacgtgtggaggagtggtcccagtgacatccaggcaccattcagcacaacactgggaagtgattcttccctcaggcccctctgcctaccaacacctgggctcctcactgggggaaacaaaagcctataaaccccagcaacaaaacctagtcctcttagacgttcttgcgctttgattttttagggcgtgtgccctgttacacttatagggcctaggatgcttgtgttgagtaaaaaggagatgccccaatattcaaagctgctaaatgttctctttgccataaagactccgtgttaactgtgtaaacacttgggatttttctcctatgtcccgaggtctggtcttgatttcttttttgggtttctttctaggaaaatgagaagtgcatgcaaggggcaggagatgaccctcccctaggctttcagcttcaggcagcttcttcacagcctgttcagcctgggctcctggaggacagccctgggggaggcagtgaggggcagcgcaagatagccaggtggttggttccaggaccacagtgtcttttttttgttgttggttttttcgttgttgtcgttcgtttgttcgtttttaactgccactgccgcccctgaccccaatcttggtcagctctggagtactgcctgccccagacgagcaggggttgggggggagcactgatcctcctccctgggcagggcagagggctttcctaaccgagcagtagggatagaaagcgtgagcctgggagtgctttttataaattattttccttgtagattttatttttaatttatctctgtgacctgccagggagaggagagaaagaaatgctgtgagcacatgacaaaataaaatcaaataaaatggatgattcagcttaaaaaaaaaaaaaaaaaaaaa

SEQ ID NO: 2775 - DNA, 1743 bp, Mus musculus
gaattcggcacgagtggcggcggccccgacaccggcagagcagccgcgcagcggcggaatggaacggcgccggggctgagccgggcgcactcgggccgccgcatgtgccgcgcggggagcagctgccgagcgggcggagagcgaacgccaggggccccgtcggagcggccgcacgagcagcgccggagatgggagaacagcccatcttcaccacgcgagcgcacgtcttccagattgaccccagcaccaagaagaactgggtgccggcaagcaagcaggccgtcacggtttcctacttctatgatgtcaccaggaacagctatcggatcatcagtgtggatggagccaaggtgatcataaacagcactatcaccccgaacatgactttcaccaaaacgtcacagaagttcgggcagtgggctgacagcagagccaacaccgtgttcggtttgggattctcctccgagctgcagctcacgaagtttgcagagaagttccaggaggtaagagaagctgccaggctagccagagacaagtcccaggagaaaaccgagacctccagcaatcattcccaagcatccagcgtcaatggcacagacgacgaaaaggcctctcacgcgagcccagccgacactcacctcaagtctgagaatgacaagctgaagatcgcgctgacacagagtgctgccaatgtgaagaagtgggagatggagctgcagaccctgcgggagagcaacgcccggctgaccacggcactgcaggagtcggcggccagcgtggagcagtggaagcggcagttctccatctgcagggacgagaatgacaggctccgcagcaagatcgaggagctggaagaacagtgcagcgagataaacagggagaaggagaagaacacacagctgaagaggaggatcgaggagctggagtcagaggtccgagacaaggagatggagttgaaagatctccgaaaacagagtgaaatcatacctcagctcatgtccgagtgtgaatatgtctctgagaagttagaggcggccgaaagagacaatcaaaacttggaagacaaagtgcggtctctaaagacagacatcgaggagagtaaataccgacagcgccacctgaagggggagctgaagagcttccttgaggtgctggatggaaagatcgacgacctccatgacttccgtagaggactctccaagttaggcacagataactagggcggggcggagcaagtgtgtgtgagaggtgtggtagacgtaggacattctccatttgcttctgtaaatgcaggtgcgatctgtctgtctccagaccaattgtgccgtccgctcactcctccagaataggaaatctctcgcttctctggctttgtgaggtcatggacagctggaagcttctgactcaggaatccagaacttggtctaccttagccgtttacgcagtcagggcagggatgtttagatcttcccttaagggctgttgtaaccctatgaaccggggatgggggagtattttctaatccaagtaccattatcctttacagcaggccctcgggtgccttctgctgcgtggcattcagtgtatgtgactctccagcaggttctagaccacgggcatgtggagggagcatcttttcccagtatgcattttgttgctttagcagatgtgacatgacattgtcaaccacaaagttcacactcaaaaactgcacaactgacttactcaaaaagaaataattgt

SEQ ID NO: 2776 - DNA, 398 bp, Mus musculus
tttcacatcctctctgcactctggaccctggctgccaccactatgaaaactcattactttctcctggtgatgatatgttttcttttctcccagatggagccaggtgttggcattctcacaagtcttggacgaagaacagatcaatacaaatgccttcaacatggaggattctgtctccgctccagctgcccatctaataccaaactacagggaacctgtaaaccagataagcccaactgttgtaagagctgacagtagtttgaagaatggacataaaggacgagcgatggattgtaaaattagtgttttaataaatgaaatgtttttgaagtttatttacatcatatcaaaataaattttatttctcagtttagaagagcaaatttttttaaaaagta

SEQ ID NO: 2777 - DNA, 568 bp, Mus musculus; identical to SEQ ID NO: 2317

SEQ ID NO: 2778 - DNA, 432 bp, Mus musculus
tttttttttttttttttgtcttttggggtaagagatttattaagagaattatcagtaccacagacacacaggcacagcggcacagtgtacagtagcgggaacattcaagccccagtgtcatagacacacagacaacatggtagggttctgaagaggatccaagttccccagggtagagtggggggccccttcctatagatctcagtagaagggggaggtttcacatcaccagactgtctctgattccccggcagatgcccaccatctggcccagccctctaagtccaactggtgcttcctcatgatacaaggatgtctggtcatcctcctgacacgggtgaggaaggcctgtgctgccaggccccttggagttgaggtaggagggtcaataacagggagtccagcacagctaggccctcccaggaacaccgg

SEQ ID NO: 2779 - DNA, 541 bp, Mus musculus
ttttttccctcacaaagaaagggcagtcgtttaattctgagcagttacaaggttgagcctccctttacatccactataggatttaatagggtccgtgtgacatttattaagggatagtggcctgcaaatgatgagcttggatcaaggcaaacacgaggcaaaaaagacccagggtgcccagcaggaaaaacacctgggtccccaagaggctccgttttttagtgtcctgcacaaatggaaggctagccacaaggatgatggttaacacaaatgtcgtgatgatgcctgctccagccactgcctccaagacaatgccccaggcccccgagcggtcacagaggttgtagtagaggggatccagatggcaaacaggaccccaaagaggaagcgtcgagaggcacaggtagagaagaccggcttcaccacacaggcaaacacgaggcagaagagacccagggtgcaccaccatgcccagccgaaaatgcagttctttaacatttcctacaagccagatgtttttcactaggtgtcccatcaagtt

SEQ ID NO: 2780 - DNA, 755 bp, Mus musculus
  misc_feature 566, 642, 682: n = A,T,C or G
gattttattagtttctactttctcaacacttgatattgactgttcatccttacagaaatgaaacgcaagcattaacacatagtaaacacgggaaagggcttctcttgttttcttttacaaagtttggatgttcagaatgatgtcaaatgtttttataattgggaaggactggtttggttacataacactacagagcatttaacaattctgttgtgaatttgaatttactttaaaactgaagagttcataatgtaaaagcttatttggaaagtaaatttttacatgtttactgtctacagttccatgtataaatccagggggaaaaaaatgaagctgtaaatctagtttaagaactgagcagatgaattgatgttgggtaaaatatttgtaagtcatttgctggtaagtttatacatggagagtaaccatggtttctatagaagagattgtaacacatgaaatgatattgctacaggtgaaaatatgagagagcttgaaagccctggtgcactgagtctccactgaatgttgcctgcagagtgcagatactgcagactgaatgagtncttggtgcttaaatagcttccacatagttggcagggagcaatccggtccctgcgttctctgccagtgccatacatncagccttcatcaatcgccttagcattcactatagcatctncatcccttaaagacacttcatccgcatctgcagccatatagtcatatatatgcccccggagatttcccgcagt

SEQ ID NO: 2781 - DNA, 462 bp, Mus musculus
tttttttttttttttttaagatgtaagaaaatatatttattttttccatgacaatactatgataaaattgttaaatacatgcatgttttaaaaacagacattggtaacatctttatataattaacagccaagcgatagtagttttatatttgcagtgtcttaggctatttacatcatctatgttcttgtgataatcatgtctctcaaaagatatggacgctaaattctgaaattatgctataaagggttcaaatttcccgttttaacagcgacataacatttcacaaagctgggaatgtctccgctgtcaatctccgtgagtactgttttattctatactcaactcagaatcttttgagtcggagtgaatcgcagacacacacacatcaatctcctttatgtcctgtgtgtgagcattgaaaagattccttataggactgaacatgatcctcgtgccgaatt

SEQ ID NO: 2782 - DNA, 3969 bp, Mus musculus
tgtcagactctcgatttctcctcctactcctcctccgaggaattctgcgccctgtaactgttctgccctcccctttaaaggttgacttgccctacggcgctccaccgcgctccagtcctcttgcgcctcctgctcaacccgctcctgactgccccacgccgcgtagttccagcagcaaagcagaagggtgcaccgggagatggagagcaaagccctgctcctggtggtcctgggagtttggctccagagtttgaccgccttccgaggaggggtggccgcagcagacgcaggaagagatttctcagacatcgaaagcaaatttgccctaaggacccctgaagacacagctgaggacacttgtcatctcattcctggattagcagactctgtgtctaactgccacttcaaccacagcagcaagaccttcgtggtgatccatggatggacggtaacgggaatgtatgagagttgggtgcccaaacttgtggccgccctgtacaagagagaacctgactccaatgtcattgtagtagactggttgtatcgggcccagcaacattatccagtgtcagctggctacaccaagctggtgggaaatgatgtggccagattcatcaactggatggaggaggagtttaagtaccccctagacaacgtccacctcttagggtacagccttggagcccatgctgctggcgtagcaggaagtctgaccaataagaaggtcaatagaattactggtttggatccagctgggcctaactttgagtatgcagaagcccccagtcgcctttctcctgatgacgctgattttgtagatgtcttacacacatttaccagggggtcacctggtcgaagtattgggatccagaaaccagtggggcatgttgacatttatcccaatggaggcactttccagccaggatgcaacattggagaagccatccgtgtgattgcagagagaggactcggagacgtggaccagctggtgaagtgctcgcatgagcgctccattcatctcttcattgactccctgctgaatgaagaaaaccccagcaaagcatacaggtgcaactccaaggaagcctttgagaaagggctctgcctgagttgtagaaagaatcgctgtaacaatctgggctatgagatcaacaaggtcagagccaagagaagcagcaagatgtacctgaagactcgctctcagatgccctacaaagtgttccattaccaagtcaagattcacttttctgggactgagaatggcaagcaacacaaccaggccttcgaaatttctctgtacggcacagtggccgagagcgagaacattcccttcaccctgcccgaggtttccacaaataaaacctactccttcttgatttacacggaggtggacatcggagaactgctcatgatgaagcttaagtggatgagcgactcctacttcagctggcccgactggtggagcagccccagcttcgtcatcgagaggatccgagtgaaagccggagagactcagaaaaaggtcatcttctgtgctagggagaaagtttctcatctgcagaagggaaaggactcagcagtgtttgtgaaatgccatgacaagtctctgaagaagtctggctgacactggacaaacaaacaagagaagaaagcatccgagttctttgaagacagaagaaaacaaagtaaatttaatttaaaaaaataatacccttgtttgggtgtttgaaagtgggttttcctgagtattaatcccagctctatcttgttagttaaacagaagacagtctcaaatattaaacggtggctaacccagggtgaggaatctaatggcccatagcaggtcttccagcatcagaagacatcaggcaggagaaacatgctgtcttgtatcccttaagaaggaatcatttgttcccaacaatataagactccatcatgtgacccatttggtcatggtctaaaattagtaagaactctgaggttttatattgagaccttttcaaagttttctcaaagtctaatatagacaatattttttgtggcatgagtcaggtccatttctttagcggttgaaacacctggcctttgcaactagtttttttttaccattgggatatattccccccaccaaaaaaaaaaaaaaaaaaaagtaaccaggaacgtgtgacttggcaaaagcagttgaagacatggctcatgaagtcctgacccttggtcccaccacaacaaagtacaagtcaacagagatacaaaacctagactgagtaattcttaatagacttgaatttttatggcttaatccttctatcttttaaatatttgtcagatattttaacattgttctctggatagatgttgaaaatgagcttataagctgggcaatggtggcgctcacctttaatcccagcacttggcaggcagaggcaggcggatttctgagttcaaggccagcctggtttacagagtgagttccaggacatccagagctacacagagaaaccctgtctcgggaaaaaaaaaaaaaaagaagaagaaggagaagaagagggagggagggagggagggagggagggagggaggaaggaaggaaggaaggaaggaaggaaggaaggaaggaaggaaggaaggaagaaagaaagaaagaaagaaagaaagaaagaaagaaagaaagaaagaaagaaagaaagaaagaaagaaaatgagcttgtaattgaggtgacacataaattttgctgaaagacaaaaatgcctaggttgattttacttctcttttttgctttcttgaaaaaagtcacaattgtcccatgctgtaaccaagtctggcctagaactaaactatgtatttcaggctggccttgaactctcaaccatcctgccttagcttcctgtgtcctgggagcttgagaaccgtaattttattatcagatttttcttacttgttttcatcaatttgaaatgcccaatatccaatactttgtatttcatttgagactcatctccgccatgcctctgtcacacttctaacacatcacattaatttctagtttagatgtgatcaagttcaaattctgcactgtgcaaagtacaagttttagagcaggaccattttttttatcacataaaagttgaaattactagaaaatgtgcatatggatgcttgtaaactgctgtgcaaagagaagagccctcaactgtaatagctatagaaagtaccaggattgttgccgctgttttgttttaccttaacaacaacaacaacaaaaatcaataatgaagaattatttatgaacgagatctcacattttcagattgcttttattattcattaatgtaaaatgataaagaagatctatctcagaggctatagctgggagcagaaactgtgaaatttgtgggtatctgaacaccaacccacatgcaaaaccccacaagtgtagtcgtcattcaatgtgattcagaaaggaaagagtcaagggatatactggaatatgttagagaagtagttccagatatgctggaatgttagcccttgctaggagaaagctggttgtgcctatgtaatataggacaaaggtgaccgatttcatcaagtttggagtcaattctaacaataaaaatatgtataatttgttaccggcatccccattattgctaattcattacagtatatacacatccatgcatacatatgtcaatgatgctttagctttcaatttatttattagctgtaaataatgtgtgggtatgtaagaatgcttgtaaacactggaaagtctgttgtggttatctgcagtatagatttgtggtgctaactttgtgtccgtctccatccatgattgtctgtctcactgagccaacttaactctgatgaaacagtacaatgaaataggcttttgaaagaagaaaactcacctgtgtgaagaaatggtatctgctttcaataaaactgagaacattttatcatga

SEQ ID NO: 2783 - DNA, 533 bp, Mus musculus
  misc_feature 509: n = A,T,C or G
tctccctgcaagctttatttccttctccacaaccccatgccctggttgtacaagacgtccccagacaccgacaaaaccccaaaaatattcaaaaaggagaatagcaccctcccccacgtgtgtcctgcatcctggatagttttttattatcaacctaactccatctagaatcaaccaggaaattcttaaatagagaattgtcctcgccagcccgcctgggctgggcctgtctgctgggcactgctttgcttgatgattgattcaatccactgtgggcagtaacaatcctaggcaggtagacctggacaatctataaaagctaagcattaggcagtgtgtgagccagtaagcagccgtcctccatggttcccgcttcagttcctgtcttgacaatgatggcagcggcctggcataagctggaagagcccttccctgcctctgagctgctcttgatcagtctttaccatcacagaaatgaaactagaataccctaccatctcttcacctgnggtgaatgaaagacttggggacac

SEQ ID NO: 2784 - DNA, 8077 bp, Mus musculus
ccagaatgaagtaagggtgagattgtctgtgaggcagtccagcctctccttgttccgcatcgttctgagatacatcagtcctggaacggaagccatatccggccgaatcactctttactcatcgcagggagattcggatgctttgcaaagcagaaaaatcacctttcccccgagtaaagagccagcctttgtcacagtccctgggaatggctttgcaggcccattctccatcacacctgggacgtggattgcttgcatccaggtggaaggagtccttctggactacctggtgctgcttcccagggactactatgaagcattcaccctgcaagtgccagtcacagagccatgtgcccacacaggatctccccaggacaactgtttgctttaccagcatttaccactgactgcattctcctgtaccctggcttgtgaggccagacacttcctgctggatggagagctgagacccttggcaatgaggcagcccacacccacacacccagccatggtggacctcagcgggagagaggtagaactgcagcttcgtctgcgggtcccacaggttggccactacgtggtcctgctggagtatgccacggaggtggagcagctttttgtggtggacgtgaatctgaagagctcagggtctcgcttggcaggccaggtgaacatatacagctgcaagtacagcatcccgtgcaggagtgtggtgattgacagcctgagtcgcacggctgtacatgagctgttggcagatgcagacattcagctcaaggcgcacatggcccatttccttttgtatcacatttgtattataccagctgaagaattctcaactgaatatttgagacctcaagtccactgcattgccagctacaggcagcatgctaatccaagtgcttcctgtgtctccctggcccatgaaactcctccaacagcctcaattttggatgctacaagtaggggccttttctctgccctacctcatgagccttcctctcctgcagatggagttactctgaaggcaccacagagtcaagtgaccctgaaaggactcataccacacctgggccgacacgtctttgttatccatttttatcaagcagagcacccagggtttcccactgaggtgattgtgaatggaggaagacagcggtcaggttccttccttgcctccttctgtccccacttacttggctgccgggaccaggtgatctctgatggccaggtggagtttgacatctctgaagcagaggtagctgtgacagtgaagattccagatggaaagtccttaacattggtccgggttctagtggtacctgcagagaattacgactaccaaattcttcacaaaacaacagtggataagtcctccaagttcatcagcagttgtggaggagacagcttttatattgatccccaggcagcctctggattctgtaagaattctgcaaggtccctggtagccttttaccataacggtgccataccctgtgagtgcgaccctgctgggactgccggccaccaccactgtagtcctgagggtggcagtgcccttgccggcccaatgtcatcgggagccagtgcagccgctgtgcgacagggctactatggattcccatactgcaagccttgtaattgtggcagacgcctttgtgaagaggtgacagggaagtgtctctgcccaccccacacagtcaggcctcagtgtgaggtctgtgagatgaattccttcaactttcaccctgtggctggctgtgacgtctgcaactgctccaggaagggcaccattgaggcggccgtctctgagtgtgacagggacagcgggcagtgcaggtgcaagcctagagtcacagggcagcagtgtgacaagtgtgctcctgggcttctaccagttcccttgaagtgtgtcccctgcagctgtaacagagatgggactgagcccagcgtatgtgacccagagactggggcttgcatgtgcaaggaaaatgtagagggcccccaatgtcaactgtgtcgagaaggatcattctacctggacccaacaaacccaaagggttgtaccaagtgcttctgttttggagtgaatactgactgccagagttcgcgtaagcaacgagctaagtttgtagacatgatgggctggccgttctggagaacagcagatggagttgatttccctgtgtccttcaaccctggcagcaacagcatggtggcagatctgcaggagctgccgccctcagttcacagtgcatcctgggtggcacctccatcctacctaggtgataaggtatcatcgtacggcggctacctcacctaccacgccaagtcctttggcttacctggagatatggttcttctgggaaagcagccagatgtgcagctcactggtcaacacatgtccctcatccataaggaacccagcgacccacggccagacaggctgcatcacggaagagtgcaagtgattgagggaaacttcagacacgaaggcagcagtgccccagtgtcccgggaggagctgatgactgtgctgcccagactggaaagactccacatccggggcctccatttcaccgagacacagcggctcaccttgggtgaggtagggctggaggaggcctctgacacgggaagcggacccagggctcatcttgtggagatgtgtgcctgcccccctgactacacaggtgactcatgccagggttgtcgccctggatactattgggacaacaaaagcttacctgtaggaaggtgtgttccctgcaattgcaacggacattcaaatagatgccaggatggctccgggatatgcattaactgtcagcacaacacagctggggagcactgtgagcgttgccaagcaggtcactatggaaatgccatccacggatcttgtagggtctgcccctgccctcataccaacagttttgccaccggctgtgctgtggatggtggagctgtgaggtgtgcctgcaaacccggatacacaggaacacagtgtgagaggtgtgcaccaggatattttgggaacccccagaaatttggaggtagctgccagccatgcaattgtaacagcaatggccagttaggtccttgcgaccccctaactggagactgtgtaaaccaagaacccaaagatggcagccctgcagaagaatgtgatgactgcgacagctgtgtgatgacgctcttaaatgacttggcctccatgggtgaggaactccgcctggtgaagtcaaagctgcaggggctgagtgtgagcacgggtgctctggaacagatccggcacatggagacgcaggccaaggacctgaggaaccagctgcttggcttccgttctgccacctcaagtcatgggtccaaaatggatgacctggaaaaagagctgagtcatttgaaccgggaatttgaaactctgcaagaaaaggcacaggtcaattccagaaaagcacaaacattatataacaacattgatcagacaatccaaagtgccaaagaactggacatgaagattaaaaacatcgttcagaatgtgcacattctcctgaagcagatggcgaggccaggtggagaaggcacggacttgccagtgggtgactggtccagggagctggccgaagctcaacgcatgatgcgagacctgcgaagccgagactttcaaaaccacctcggagaagcagaggccgagaaaatggaagcccagctcttactgcaccggatcaggacctggctggaatcccaccaggtggagaacaacggactgctaaagaatattcgggactccttaaatgattatgaagacaaacttcaggacctacgttccatcctccaggaggcagctgcccaggcaaagcaggccactggcatcaaccatgaaaatgagggggttctcggagccatccagagacaaatgaaagaaatggattccctgaagaatgacttcaccaagtacctggccacagccgactcttccctgctgcagaccaacaatctactgcagcagatggacaaaagccagaaggaatatgaaagcttagctgctgctttaaatggagcaagacaggaactgagtgacagagtgcgagaactctccagatcgggtggcaaagcaccgctggtggtggaggcagagaagcatgcacagtctttacaggagctggcaaagcagctggaagagataaagagaaacaccagcggggatgagctggtgcgttgtgctgtggatgctgccacggcctatgagaacatcctcaatgccatcagagcagcagaggatgcagccagcaaggccaccagtgcctccaagtctgccttccaaacagtgataaaggaagaccttccaaaaagagctaagaccctgagttctgacagcgaggaactgttaaatgaagccaagatgacacagaaaaggctacagcaagtcagtccagctctcaacagcctacaacaaaccctgaagactgtatcagttcagaaggacctgctagatgccaacctcactgttgcccgtgatgatcttcatgggatacagagaggtgatatcgacagtgtggtgatcggtgcaaagagcatggtcagggaagccaacggaataacaagcgaggtcctggacgggctcaaccccatccagacagatttgggaaggattaaggacagctatgagagcgcacggcgtgaagacttcagcaaggctctggtcgatgccaataactcagtaaagaaattaaccaggaagttgcctgatctttttatcaagattgaaagtatcaaccaacagttgctgcccctggggaacatctctgacaatgtggaccgaatccgagaactcattcagcaggccagagatgctgcaaacaaggttgcaattcccatgaggttcaatggtaaatctggtgtcgaagtccgactgccgaatgacctagaagatttaaaaggatacacatctctgtctttgtttctccaaagacctgacttgcgagagaacggaggcactgaggatatgtttgtaatgtaccttgggaataaggatgcctccaaggactacattggcatggcggttgtagatggccagctgacatgtgtgtacaacctgggggacggagaggctgaagttcagatagaccaggtcttgacggagagtgagtctcaggaggcagttatggaccgggtgaagtcccagaggatatatcaatttgccaagcttaattacaccaaagaagccacatctactaaacccaaagcccctggggtctatgacatggagagcgccagtagcaacacactccttaatttggatcctgagaatgcagtattttacgtcggcggttatccacctggttttgagcttccacgcagactgcggttccctccatacaaaggctgtatcgaactagatgacctcaacgaaaacgttctaagcttgtacaatttcaagacaactttcaatctcaataccactgaagtagagccttgtaggaggagaaaggaagagtcggacaaaaattactttgaaggcacaggctatgctcgaattcctacccagccaaatgctcccttcccaaaactttcatggaccatccaaactactgtggacagaggtctactgttcttcgcagaaaaccaggataacttcatatctctgaatatagaagacggcaatctcatggtaaaatacaaactaaattcagagccacccaaagagaaaggaattcgagacaccatcaacaacgggagagatcacatgattttaatctcaattggaaaatcacaaaagcggatgttgataaatatgaataaacatagtataataattgaaggggaaatatttgatttcagcacatattacttgggaggaattccaattgcaatcagagaaaggtttccactctcaacgcctgctttccaaggctgcatgaagaatctgaagaaaaccagtggggttgtcaggttgaacgatacagtgggtgtgaccaaaaagtgctcagaagactggaagcttgtgcgaaccgcctcgttctccagaggaggacagatgagtttcacaaacttggatgtgccctcacttgaccgcttccagctctcctttgggttccagacctttcaacccagcggtacactactaaaccatcagacacggacaagtagcctactggtcaccctggaagatggtcatattgcgttgagcaccagggacagcagcagcccgattttcaagtctccagggacctacatggatggtttactgcatcatgtatctgtaataagcgacacctcaggcctgcgccttctcatcgatgaccaggttctgagaagaaaccaaaggctcgctagcttctctaatgcccagcagtcgctcagcatgggaggcggttatttcgagggttgtatcagcaacgtttttgtccaaaggatgtcacagagtccagaagtcctggatatggccagcaagtctactaagagggatgcattcctaggaggctgcagtttaaacaagccaccttttcttatgttgtttaagagtcccaagggatttaacaaggcccggagtttcaatgtcaatcagctgttgcaagatgcacctcaggctgcaaggagcatagaggcttggcaagatgggaagtcctgcctaccacctctgaacaccaaggccactcacagagccctgcagtttggggacagtcctaccagccacttgctattcaagcttccccaggagctgctgaaacccaggttacagttttctttggacatacagacaacttcctccagagggctagtgtttcacacaggcaccagggactcctttgtggctctctatctctcagaaggccatgtcatctttgccttgggggcaggagggaagaaactgagactcagaagcaaagagagataccacgatgggaagtggcactcggtggtgtttggactgagtggaagaaaggtgcacctggtggtggatgggctgagggcccaggaaggcagtttgcctggaaactctaccatcagccccagagaacaggtttacctggggttgtcaccatcaagaaagtcaaagagcctcccccagcacagttttgtggggtgtctgaggaacttccagttggactcaaaacccctggattccccctctgcgaggtctggggtatctccctgcttaggtggctctttggagaaaggcatttatttctcccaaggaggaggtcacgtggtcctagccaattccgtgtccttggagccagcacttacgctcactctcagcattcgcccacgaagtctcaccggggtcttgatccacatcgcaagtcaatctggagagcacttaagtgtctacatggaggcagggaaggtcacgacctctatgaacagtgaggcaggtgggaccgtgacatcaattacaccgaagagatctctgtgtgatggacaatggcactcggtgacagtctccattaaacagcacactctgcatctggaactggatacatacaatagctacacagctgggcagctttccttcccaccgaacagcacccgagggtcactacacattggaggcgtcccagacaaattgaaaatgcttacactccctgtgtggaactcattttttggctgtctgaagaatattcaagtaaaccacatccctgtccccatcacagaagccaccgatgtccaaggttctgtcagcctgaatggctgccctgaccactaactctacccaggcaagagaagtcacctttgggagcacccctcccccattcaaaaccatcaagctgtcatagacacagtgctgtacagatctctgtctttcagtgacacacatgcattttatatcaaaatctcatttcatgaagaaaatgagcaaattgttattcaaacattcacacaacactttagttaatattattttttccactaagaattatatgccttctagagagctttttcccccaatcactaaaaagaacatcttgtttagagcactttatgaatacaaaactttaaaacatgttaaattgctacagttcattgggattaaataaatacaatgcactcttcaaaaaaaaaaaaaaaaaag

SEQ ID NO: 2785 - DNA, 228 bp, Mus musculus
ccgaaggaataagatgcatcgtggtgctggattgattcttgggaccaaaaagagactagggagagaaagcacattagcaggtcaaccaggactcataccttccagtttgggtaatcttatctctggggtgggctggatgaagaatgtatgggaactctagtctctgcaacttttctgtaaatccaaagtcattctaaaataaaagtgtatttaattaacacacacacc

SEQ ID NO: 2786 - DNA, 2015 bp, Mus musculus
gctcgcgcgcctgcaggtcgacactagtggatccaaagaattcggcacgagtgaaagtccatctgctgcatcggtcaagagaaactccacttgcatgaagattgcacgcctgcagcttgcatctttgttgcaaaactagctacagaagagaagcaaggcaaagtcttttgtgctcccctcccccatcaaaggaaaggggaaaatgtctcagtcgaaaggcaagaagcgaaacccgggccttaagattccaaaagaagcgtttgaacagcctcagaccagttccacgccgcctcgggatttagactccaaggcttgcatatctattggaaaccagaactttgaggtgaaggcagatgacctggagccgatagtggagctgggacgagcggatacgggccacagttaatagccaggaacagaaacggctgctgatggatttggatgtctccatgaggacggtggactgtccattcaccgtgaccttctacggtgcactcttccgggagggcgacgtgtggatctgcatggagctcatggatacgtcactagataaattctacaaacaagttattgataaaggccaaacaattccagaggatatcttaggaaagatagcagtttctattgtaaaagcgttagaacatttacacagtaagctgtctgttatccatcgagacgtcaagccttctaatgtgctcattaacacactgggccaggtgaagatgtgtgactttggaatcagtggctacctggtcgactctgttgctaaaacgatcgatgccggttgcaaaccatacatggctcctgaacgaataaatccagagctcaaccagaaggggtacagtgtgaagtctgacatttggagcctgggcatcaccatgatcgagctggccatccttcggtttccttatgattcttggggaacgcccttccagcagctaaagcaggtggtcgaagagccctctcctcagctcccagcagacaagttctccgcggactttgttgactttacctcacagtgcttgaagaaaaattccaaagaacggcccacatatccagagcttatgcaacatccatttttcaccgtacatgaatccaaagcagcagacgtggcatcttttgtaaaactgatacttggggactaaaaagccatggacttaactggtcgaccctactgtggattggtgggtttacagggtgaagaaagttcactacagagccaacagaaagtcatcttgaggtcattgaaccctgcctttctgaggggtttcctctccccgtttttctttttcctctccaaagggggccttggaatctctagcgtaggctgaactctctagatggatgaaatacaacaaaggcttaggacttgaaatggtgattaaatatttaatggcaagtcatacgggtgggtcctcgagcttctcagatctctcgtgttctttacgaaatgaatgcaattggccctggtaacaaggtgctacagtagtgaagagattgtgaagtagatttgtagcgtatcccacttattattttaatatttatgtttcagtgcttggttggaaatattccattttatgcaagaagggagatacagagacagggctgactcggcagtatttatagggcttttattttttttgagttcaatcatgtctgtggtccagaggaagttatttaatatgcatttttaaggatattataaaaatctccagcaaaggggctcttcctgtacagtgtggcttgcagctctcatggctgctgctcccgactgtcaactcaaccgtggctgatcatcgcatcgtttgaatgaactgtcaaagttaatgtccccccgcctccctcccccaactttggaaaccatgaaagtcacttgtatcacggctcaaagagtaaaaaaatacaatggttctcttcaaaaaacaaaaaaaaaaaaaaaaaaaaactcgagagtacttctagagcggccgcgggcccatcgattttccacccgggtggggtaccaggtaagtgta

SEQ ID NO: 2787 - DNA, 571 bp, Mus musculus
atggagactcaagtgctgacgccgcatgtctactgggctcagcgacaccgcgagctgtatctgcgcgtggagctgagtgacgtgcagaaccctgctatcagcatcacagacaatgtgctgcatttcaaagctcagggacacggtgccaaaggagacaatgtctatgaatttcacctggagttcttagaccttgtgaagccagagccggcgtacaggctgacccagaggcaggtgaacatcacagtccagaagaaggggagtcattggtgggaaagactcaccaagcaagagaagcgcccattgtttttggcccctgactttgatcgctggctggatgaatctgatgcggaaatggagctgagagccaaggaggaagaacgcctaaataaactcagactagaaagggaaggctcccctgaaactcttacaaacttgaggaaagggtacctgttcatgtacaaccttgtgcagctcctggggttctcctggatctttgtcaacctcacagtgcggttctttattttaggaaaagagtccttctatgacacgttccacaatgtggctgacatga

SEQ ID NO: 2788 - DNA, 2069 bp, Mus musculus
  misc_feature 2049: n = A,T,C or G
cttgcagagcaacgatggaggaaaaacatcaagaggagacaggggagctgacattggtccttgctctggcaacgctcatcgctgcctttggctcatccttccaatatgggtacaacgtagctgccgtcaactctccctcagagttcatgcagcagttttacaatgacacctactacgacagaaatgaggagaatattgagtccttcaccttgacgctgctgtggtccctgacggtgtccatgttcccctttgggggctttataagctctctcgtggttggaaacttggtgaataaactgggcaaaaaaagggccctgctgttcaacaacatattctccatcctgccggccatctttatgggctgcagccaaattgcccaatcgtttgagctaataattatttccagacttctggttggaatctgtgcaggtatctcttccaacgtggtccctatgtacttaggggagctggccccgaaaaacctacgaggggctctgggagtggtcccgcaactcttcatcactgtcggcatccttgtggcccagctgtttggccttcggagtctcttggcaaatgaggatggctggccagttctcctgggtctaactggagtccccgcaggccttcagctcctcctcctcccgttctttcccgagagcccccgctacctgctgatccagaagaaagatgaagcagctgctgagagagccctccagaccatccgaggctggaaagacgtgcacctagagatggaggagatccggaaggaggatgaggctgagaaggcggcgggcttcatctctgtgtggaagttgttcactatgcagtctctccgttggcaactcatctccatgattgtcctcatggctggccagcagctgtcgggagtgaacgcgatctactactacgccgatcagatctacctcagcgcaggcgtgaaaagcgacgacgtccagtatgtgacagccgggactggggccgtcaatgtgttcatgaccatcctcacgatctttgtggtagagctttggggacggcgattcctactcctcgtcggcttctccacctgcctcatagcctgcttagtgctgacggccgcactggcgctgcagaacaccatctcctggatgccctatatcagcattgtctgtgtcattgtctacgtcataggacacgccttaggacccagccccatccctgccctgctcatcactgagatcttcctgcagtcctcccggccagccgcctacatgatcggaggcagtgtccactggctctctaacttcactgtggggctcatcttccccttcattcaaatgggcctcggtccctacagcttcataatctttgcaaccatctgtttcctcaccaccatctacatcttcatggtcgtcccagagaccaagggcaggacattcattgagatcatccagatttttaccatgaagaacaaggtgtcagacgtatatccgaagaaggaggaggagcttggcgccctcccacacgccatcttggagcagtagcagagccaggccaccagccagcctggccagtctgcatggacctcctgtctagacgttggttctggattcttgtctgtgacactggaagggagatgagcctggtgggaagtgtcagccccgtcaccgggcctccaacttcagtgggaacatctgcctgcttttgtgctttcctgctgtctctaactatagaggccagtcataggctcttggtctcgtgcaaagccatcccttgcctttaccgggttgactctggtgagggtcttgtaagcatcgcttttctaacaaaaagagttgctgcaagaccagatgtgatgatcatattttaccagcaaaactgactcttgtgtgtttcccgtgggcctggagagaactctggcatctacttgggattgatgttgtcttctttccctacccagccatgtcataaagtgggggaacaggccatttgcgaagacacactgagcgtggattattaactgtaagcgatactactttgtataaccaataaaacagatatgatcacttctcnaaaaaaaaaaaaaaaaaaaa

SEQ ID NO: 2789 - DNA, 535 bp, Mus musculus
tttttgtaggcaaatggtcaatagttttatttcggcatttactaacgtcttaaatataatcacatataaaacaaacatttcaaaagtgcaaaatatcagcaaggttatcagagctactcatcgtcccttgcagacagtctcccaccaactgtgctgccagaatcacagacagaatcacagacagaatgctgtcaccctggagtttagaaacagccttggtcaggagattgtgcatgataacagacgacgcagtgcaggtccacacccaggtcccttgccaccacactgccttgtataacactcagcgtggtcacgtgtaagtaccggactgcgggaagaagcctttctcagtgcaggggtttatctagctctccagggccaagctgcccatctttggtcacaagaacgcactcttggttgtactttggtttactcttaagtagtaatgactctgctaacaagagtaaacaaacctcaagacagcaattgacaaaacttactttttagtatttaatgaatatactacttaattctc

SEQ ID NO: 2790 - DNA, 4883 bp, Mus musculus
gggtgtacaaccctgactttccacagtggcgtctctcgcttctcctggctccctcaaattcacatctgtagggttgttgagtgaagattgcagacaccatgtctgactcagtgattcttcgcagtgtgaagaaatttggagaggagaatcatgctttcgaatcagatggtttccataacaatgataagaaatcaaggttacaagataagaagaaaggggaaggcgctcgagttggcttctttgaactgtttcgattttcttcatcaaaagacaactggctgatgtttatgggaagtgtgtgcgcattgctccatggaatggcccagccaggcatgattattgtgtttggtatactgacagatatttttgttgaatatgacattgaaagacaagaactcagtattccaggaaaagtgtgtatgaataacaccattgtatggatcaacagctccttcaaccagaacatgacaaacggaacaagctgtgggttggtggacattaacagcgaagtcatcaaattttctggcatctacgcaggagttggtgtggctgtccttatcctaggatactttcaaataaggttgtgggtaatcactggggctcgtcagataaggaaaatgaggaaattttactttcggagaataatgagaatggaaatcggatggtttgactgcacttctgtgggagagctcaattcaagattctctgatgatattaataaaattgatgaagccattgccgaccagatggcccttttccttcagcgcctgtcgacagctttgtctgggctccttttagggttctacaggggttggaaattaaccttggtgattctcgctgtcagtcctctcattgggattggggcagccgtcataggtctgagtgtggccaagttcacggagcttgagttgaaggcttatgctaaagctgggtctattgccgatgaagtcctctcatctattcgaacagtggctgcttttggtggtgagaataaggaggtggaaaggtatgagaaaaatcttatgtttgctcagcgctggggaatttggaaaggaatggtgatgggcttcttcactgggtacatgtggtgtctcattttcttctgttatgcactggccttctggtacggctccagacttgtcctggatgaaggcgagtacacaccagggacactgatccagattttcctctgtgtcataatagcagctatgaatattggcaatgcatcttcttgtttggaaatcttctccactgggtgttcagcagcttccagtattttccaaacaatagacaggcaacccgtcatggactgcatgtcaggagatggttacaagctagatcgaatcaagggcgaaattgagttccacaatgtgaccttccattatccttctcgaccagaggtgaagattttaaataacctcagcatggtcattaagccaggggaaacgacggcgttcgtgggatccagtggggcagggaagagcacagcactacagctcattcagagattctatgacccctgcgaaggcatggtgactctggatggccatgacattcgttctcttaacatccggtggctgagagatcaaattgggatcgtggaacaggagccagttctgttctccaccactatcgcagaaaacatccgccttggtagagaagaggcgacaatggaagacatagtccaagctgccaaggatgctaatgcatacaacttcattatggccctgccacagcaatttgacaccctagttggagaaggaggaggccagatgagtggtggacagaagcaaagggtagccatcgcccgcgccctcatacggaaacccaagatcctgcttctggacatggctacctcagcactggacaatgagagtgaggccaaagtacagggagcactgaataagatccaacatggacacacaatcatctcagttgcccatcgcctatcaacagtcagatctgcagatgtgatcattggctttgagcatggaacagctgtggaaagaggcacccatgaagaactgttagaaagaaaaggtgtctacttcatgcttgtgaccctgcaaagccaagaagataatactcacaaagaaacaggcataaagggaaaagatacaaccgaaggggacacacctgagaggaccttttccagaggcagctatcaggacagtttaagagcttccatccgtcaacgatctaagtctcagctgtctcatctgtcacatgaacctccactggctataggtgatcacaagtcctcttacgaagacagaaaggacaatgatgtgcttgtggaagaagttgaacctgccccagttaggaggattctaaaatacaacatctcagaatggccctacatactggtaggggctttgtgtgcagccattaatggggcagtcacacccatctactcccttttattcagccagatccttaagactttttcactcgttgataaagaacaacaaaggtcagagatttacagcatgtgcctgttttttgtcatcctgggctgtgtatcacttttcacacaatttctgcagggttacaattttgccaaatctggagagctcctcacaaaaaggctgcgtaaatttggtttcaaggcaatgttaagacaagatattggctggttcgatgacctcaaaaataatcctggagtactaacaactaggcttgctacagatgcttcccaagttcaaggggctactggctctcaagttgggatgatggtcaattccttcactaacatctttgtggccgtgctcatcgccttcctctttaactggaagctcagtctggttatatcagtcttcttcccctttttggctttatcgggagctgtacagacaaaaatgctgacaggattcgcttctcaagacaaggaaattctggagaaggctggccagatcaccaacgaagcccttagcaatatccgcaccgtggctggaattggagtggagggaagatttattaaagcatttgaggttgagctggagaagtcatacaagactgccattagaaaggcaaatgtctatggcctctgctatgccttttcccaggggatatcatttcttgccaattctgcagcctatagatatggaggttacttaatagtctacgaagatctgaacttcagctatgttttcagggtggtctcttccattgcaatgagcgcaacggctgttggaagaacattctcttacacaccgagctatgccaaagctaaaatatcagctgcacgcttttttcaactgctagacagaaaacctccaattgatgtgtacagtggagcaggtgaaaaatgggacaacttccaagggaagattgattttatcgactgtaaatttacatatccttctcgacctgatatacaagttctgaatggactgtcggtatctgtggatcctgggcagacgctggcattcgttgggagcagtgggtgtggtaaaagcaccagcatccagctgttggaacggttctacgatcccgatcagggaacggtgatgatagatggtcacgacagcaaaaaagtcaatgttcagttcctccgttcaaacattgggattgtctcccaggagcccgtgttatttgactgtagcataatggacaacatcaagtatggggacaacaccaaagagatctccgtggagagagctatagctgccgcaaagcaggctcagctgcatgacttcgtcatgtcactcccagagaaatatgaaactaatgttgggatccagggctctcaactctctcgcggggagaaacaacgcattgctattgctcgggccattgtacgagatcctaaaatcttgctactggatgaagctacatctgccttagacacagaaagtgaaaagacagtgcagcttgctctggacaaagccagagagggtcggacctgtattgtcattgctcatcgcttgtctactatccagaactcagatatcatcgccgtcatgtcacaaggagtggtgattgaaaaggggacccataagaaactgatggaccagaagggggcctactacaagctggtcatcactggagcccccatcagttgaccctgactggagacctttacatacagataatgatgtgccaagcacaggagggctgcgggttgtcatagctctacagagaattattaatgctttacagacagaagtatccactggcatccaaactaatcttgagtggctttcagtaataatttcagtttgaaatgtctatgtaggaaggagagaacccagagtcactgtgagttcaagtccaagggcaagcagctgcttatctatcactcagtgctgctctcggtaggagctggtccctgtctccatcaaggacttggtgacagagagcatggagtcctccttagggcagagggttgtcttttgcatttgggaaagctccttgtacagagtctgctctgtaatctggactcaactgtttgagccagctcaaggtcaagagctaagaacttaaggctactggtagtttttaatttaaaaagtttgcttgttttctatagggaagcaaatgtctttacctctgacacccgtgagtagggagaggaacacgtttccattctggaatctcccaggctcagggaggccaaaggtgagctaaggagaagtagaggttgacagtcaggggtactgatttgctcagggtgctattgtcacgatacactacagtggatctgccagtgtggagcagggactctttaccagggcttctacttttcattccctgccaccatgtcacctgatgtcccttactcctaggaaatctatgcaagcaatggaaatgcatcggaatcttaagttgttacattaaaatctagtaaaacatagtagaaaaacaaaaaaaaaaaaaaaaaa

SEQ ID NO: 2791 - DNA, 1440 bp, Mus musculus
cacgtggtgccagtgggttggctccggagtgaagatggcgtcagtgaggaaggctttcccgcggaggctggtgggcttgacgtccctccgggctgtgagcacctcctccatgggcactttgccaaagcaggtgaagatcgtggaagtcggtccccgagacgggctgcagaatgaaaagagtattgtacccaccccagtgaagatcaggctgatcgacatcgtttccgaagcagggctccccgtgatcgaggccaccagctttgtttctcccaagtgggtgccgcagatggctgaccactctgacgtcttgaagggcattcagaagtttcctggcatcaactacccagtcctgactccaaacatgaaaggctttgaggaagcggtagctgcgggtgccaaggaagtgagcgtcttcggtgctgtgtctgagctcttcacccggaagaacgcgaactgctctatagaggagagtttccagcgctttgctggagtcatgcaggcggcccaggccgccagcatctctgtgagagggtatgtctcctgtgccctgggatgcccctacgaggggaaggtctccccggctaaagttgctgaggttgccaagaagttgtactcgatgggctgctatgagatctcccttggggacaccatcggtgtaggcaccccaggactcatgaaagacatgctgactgctgtcatgcatgaagtgcctgtgacagcattggctgtccactgccatgatacctatggtcaagctctggccaacaccttggtggccctgcagatgggtgtgagtgttgtggactcctctgtggcaggacttggaggctgtccctatgcaaaaggggcatcagggaacttggctactgaggacctggtctacatgctgaatggcttagggattcacacgggtgtgaacctccagaaacttctagaagctggggacttcatctgtcaagcccttaacagaaaaactagttccaaagtggcacaggccacctgcaagctctgagacccatgttcgcctgaaccagaacggagggaattgggtgtatacaatgattcctggatgaggagtatacaatgattcctggatgaggagatggaatgagagcaaatgagccggcatcacagaggtccctgtccctcatgataagggctagagctgcctggcccgggccagctccccagagctgtgcctaagcacttgcttgggatggccctgggtgagtctgcctgccagcagagctgatgtccaccgccgcagggcctttgttctacctctgaggacagagagcagtttccccttatgccagcagagcatttgctggaatggtgggggttgatctgcgtctgtggtcatctgccaacgaaatctccactctgtgcgtgatttttttgaaaacagcttatgtaattaaaggtttaattttctaatat

SEQ ID NO: 2792 - DNA, 3000 bp, Mus musculus
cggacggccccattctgcctccatactaatgatgctggaccacaccagagcccctgagctcaaccttgacctagaccttgacgtctccaactcaccgaagggatccatgaagggcaacaatttcaaggagcaagacctttgtcctcctctgcccatgcaaggactgggcaagggggacaagcgtgaagaacaggcgctgggcccggaaccctcagagccccggcagcccaccgaggaggaggaggcactgatcgagttccaccgctcctaccgggagctcttccagttcttctgcaacaataccaccatccacggtgccatccgcctggtgtgctccaagcacaaccgcatgaagacggccttctgggcggtgctgtggctctgcaccttcggcatgatgtactggcagtttgctttgctgttcgaggaatacttcagctaccccgtgagtctcaacatcaacctcaattcggacaagctggtcttccctgccgtcactgtgtgcacccttaatccttacagatacactgaaattaaagaggatctggaagagctggaccgcatcacggaacagacgctttttgacctgtacaaatacaactcttcctacactcgccaggctgggggccgccgccgcagcacccgcgacctccggggtgctctcccacaccccctgcagcgcctgcgcacaccacctccgcccaatcccgcccgctcggcgcgcagcgcgtcttccagtgtacgcgacaacaatccccaagtggacaggaaggactggaaaatcggcttccaactgtgcaaccagaacaaatcagactgcttctaccagacatactcatccggggtggatgccgtgagagagtggtaccgcttccattacatcaacattctgtccagactgcccgacacctcgcctgctctagaggaagaagccctgggcagcttcatctttacctgtcgtttcaaccaggccccctgcaatcaggcgaattattctcagttccaccaccccatgtatgggaactgctacactttcaacaacaagaacaactccaatctctggatgtcttccatgcctggagtcaacaatggtttgtccctgacactgcgcacagagcagaatgacttcatccccctgctgtccacagtgacgggggccagggtgatggtgcacggtcaggatgagcctgcttttatggatgatggtggcttcaacgtgaggcctggtgtggagacctccatcagtatgagaaaggaagccctggacagcctcggaggcaactacggagactgcactgagaatggcagcgatgtccctgtcaagaacctttacccctccaagtacacacagcaggtgtgcattcactcctgcttccaggagaacatgatcaagaagtgtggctgtgcctacatcttctaccctaagcccaagggtgtagagttctgtgactacctaaagcagagctcctggggctactgctactataaactgcaggctgccttctccttggatagcctgggctgcttctccaagtgcaggaagccgtgcagtgtgaccaactacaagctctctgctggctactcaagatggccgtctgtgaagtcccaggattggatcttcgagatgctatccttgcagaataattacacgatcaacaacaaaagaaacggagttgctaaactcaacatcttcttcaaagagctgaactataaaactaattcggagtctccctctgtcacgatggtcagcctcctgtccaacctgggcagccagtggagcctgtggttcggctcatctgtgctgtccgtggtggaaatggcggagctcatcttcgacctcctggtcatcacactcatcatgttactgcacaggttccggagccggtactggtctccaggacgaggggccaggggtgccagggaggtggcctctaccccagcttcctccttcccttcccgtttctgtccccaccctacatccccgccaccttctttgccccagcagggcacgacccctcccctggccctgacagcccctccacctgcctatgctaccctaggcccctctgcctctccactggactcggctgtgcctggctcttctgcctgtgctccggccatggcactctgagagaggagagtgctcctctcacccaggccagtgctcctgtcacttcagcacatcttccacagctgcccagctgtctttggtgtgtcccggaggaacaggctaagcaaggggcccaggaagttgtccagaggacaggggctaatgagctgctcagagctgccctgcccctgcttctgaacactgctttccacacaagcacgggcaagtcccctttacccttggatcagccaagccagacttggagctttgacaaggaacgttcccgggaaacgaccaaacgaaccgaacacatataaacaaggcacagagaagtggccacagccttcccaccccacgaccagagactggcctggcctcactgctttcaaggacacagatgtctgctacccctcttgaacttgggtggggaaccccacccaaaagcccccttgttagctcttggcaattctccttccctcactcctcagggtgggggctagagtaagtctgacatcctcctccattctcaagactctctctctttcatttggtaccctgtaccccagtgcctctgcgtcgcctccttcttgtgtgccttctgagctgtttcttcagcctagaaactccctgctcaaaggcacctttgcttttgtgaactcgttcaccctatcctgtctcccccaggattgccccctctcccctcacccccacagcatgctgtattagatgctcacattcttttgtgtccatctccctgggtagactgaactgtgctcagggatgagctttgctcatttttgtatccttccgttctagcccagtatcccacttggaccaggtaggcagatactcaataaatgcttgttccatcaaaaaaaaaaaaaaaaaaa

SEQ ID NO: 2793 - DNA, 518 bp, Mus musculus
ttttttttttttttttgatgagatactttaatgagaaaccatttgcatcaggagtttggcactttgcagaggacttgctggcagttgcattgagtgtgtctacaatgatgaccggagcatttgtgtgtgactctgggcaatctgcagactgaagtccacattgcaaagtccacacaggagtgccctcttctcctctgctctcctcagctcctagtttccaaatcctccctctgctaggggagggattcaaagtggctagcaaattagggagtgggaaaaaatgctttggaagagtctttgctgttgccaagacaactgcccacaagcagaatgcacagtttggatcgtgtcaatttccacgaagcaagtcagtacaggtgtcacccaggtctcactctcacagaagagcagaactgatgagcacccagcatggctctcatcttctaggaaatctcacgtttccgggttagggaacattctgttggtgacggaagggatgaatgctggcattaatccta

SEQ ID NO: 2794 - DNA, 619 bp, Mus musculus
  misc_feature 87: n = A,T,C or G
tccttctgggccaccttgagtgcatcctgaaggcaagactaagacctgtgccaagagtcctgtgaagggcctctcagtacagtccangctccgggtctcagtcctcactgcctcttaccagagggatgcctctggtcaagatacagactgtctgacagaggtgtcaacctaagccagcagtgagtggtcccctgtgacacttagagaacagcattggagtgcgccagcccttggctgagatttgaaacttctggaacatttgatgggacatttgatgaattctttcactgacaagctggacgcaggcacggactttggggggaccagtaagaagggcagacttaacctgtgttggcccattgaaagcatttccagctcaaccctaagacccattctctggcatctttactctttcaggtcctcacataccccataggtccacagcttcacacatggcaaggggaaggggaggtgggtcataggagaccttgagacctgggcttaaactgatcttgcaccatgtgccagcctgaagccaggccttctttccatggccatgacagccagagctttctgaagccagatgggacccttactgccttgggcacaagttctttcc

SEQ ID NO: 2795 - DNA, 465 bp, Mus musculus
ggagggttccgttcaagctctttaattccctggagaattcgcttcatatgacccactttcggaatccccaggtccaggctgcgaacttgttttctgtttctgagccttttcctttttaaactttggcactatgcgaaagactgtgcttttgttgtttcttttggtacaatccagaggaggctcctcgtcctcactggggcggaggatataataaagccagggaatctccgttaacttctgaagctccatctccacagagtgtaaggcactggacacccgctcttcgtgaggagattccaagtgctccgggaagcgtgggttggctttgttcagggcgtgtgagcaggcattcactgcatgtgccagctcctgctccaggagacagtgaatcgtggctgcgtcacaaatcctagtgatgagttcctccgcagcctgggagcagagccgcatctgtgacacttcctc

SEQ ID NO: 2796 - DNA, 60 bp, Artificial Sequence
  oligonucleotide probe
agattcgatgtattttcttccgtgattggatacaaatgtcttttaagaaagtaaaggccg

SEQ ID NO: 2797 - DNA, 60 bp, Artificial Sequence
  oligonucleotide probe
tgcttgggtgtagtgacttccaaagcccaagtaacttacaaatgaaagtgatgagatctg

SEQ ID NO: 2798 - DNA, 60 bp, Artificial Sequence
  oligonucleotide probe
aacttggtttaggaaacccttgcttcagacgctaaccttatctccttaagacccttggac

SEQ ID NO: 2799 - DNA, 60 bp, Artificial Sequence
  oligonucleotide probe
atgttaaggaaaggagaggtgacattgtacgactggtgagttcttctctctgctaccaga

SEQ ID NO: 2800 - DNA, 60 bp, Artificial Sequence
  oligonucleotide probe
cttctgtctggtcttagttccaaagatagctagctctctctcctctttattttaaatcac

SEQ ID NO: 2801 - DNA, 60 bp, Artificial Sequence
  oligonucleotide probe
gccctgaagcttggaaggggattctgatcaatttcagaaaagcgtaggggtgaggccaga

SEQ ID NO: 2802 - DNA, 60 bp, Artificial Sequence
  oligonucleotide probe
agtgtctgggtctacttcagtctgtgtaattggtttttacctcagttcatttgtatttgt

SEQ ID NO: 2803 - DNA, 60 bp, Artificial Sequence
  oligonucleotide probe
ccagagagcaaaagagaaactactgctcttgtaatctagttacagaaataaggcatacgc

SEQ ID NO: 2804 - DNA, 60 bp, Artificial Sequence
  oligonucleotide probe
atgctgagctgtataaactgtcttcccaacaattccatgaggcggcttcaaaagcagaga

SEQ ID NO: 2805 - DNA, 60 bp, Artificial Sequence
  oligonucleotide probe
caaatataatagtataatgtatggattttgtaagtataaaaattattagatattcgtttg

SEQ ID NO: 2806 - DNA, 60 bp, Artificial Sequence
  oligonucleotide probe
tagatgacatgtccatgactaacactcacgaactatgatcttacacaagaacagaaaaaa

SEQ ID NO: 2807 - DNA, 60 bp, Artificial Sequence
  oligonucleotide probe
taatagttcctgggctctttctattgtgactgtcctctacatttgtaaatgaagtctcag

SEQ ID NO: 2808 - DNA, 60 bp, Artificial Sequence
  oligonucleotide probe
gggaaactggctgtagtcctagcttcgacttaagtttcagaataaaggttttctgcactg

SEQ ID NO: 2809 - DNA, 60 bp, Artificial Sequence
  oligonucleotide probe
atgctgtatatgatatagacacgtgtataattttatatcagttaaaaatagtattgaatt

SEQ ID NO: 2810 - DNA, 60 bp, Artificial Sequence
  oligonucleotide probe
ccaactttgaaccagggcattttaactgcccagcattttttaaaagttagttttactctt

SEQ ID NO: 2811 - DNA, 60 bp, Artificial Sequence
  oligonucleotide probe
ttggaagactatgagaaacatctgctagacatgctttgttattttgtaagacctgataag

SEQ ID NO: 2812 - DNA, 60 bp, Artificial Sequence
  oligonucleotide probe
ccctattccagagctcctaagttttgtatatatccctttgtacacatattgggacattgg

SEQ ID NO: 2813 - DNA, 60 bp, Artificial Sequence
  oligonucleotide probe
ttagcccccctttggacttttgttttcaaaggagcccccgttttccttttcctgctggga

SEQ ID NO: 2814 - DNA, 60 bp, Artificial Sequence
  oligonucleotide probe
cagtaattcaaacccaggtttgatgagttacttgacttactgaagcatttaaactgtctt

SEQ ID NO: 2815 - DNA, 60 bp, Artificial Sequence
  oligonucleotide probe
atccactccatgaaccatggagaagagagccagtccagcccatcccttctcacagcagga

SEQ ID NO: 2816 - DNA, 60 bp, Artificial Sequence
  oligonucleotide probe
gcttttccttgtggagtataaggtaaataatgcttttccttagagttttggtggtcgttg

SEQ ID NO: 2817 - DNA, 60 bp, Artificial Sequence
  oligonucleotide probe
cgggttttgcagattccaaagttgttcaggaatacaacaaagtgaacaaattttgttaag

SEQ ID NO: 2818 - DNA, 60 bp, Artificial Sequence
  oligonucleotide probe
cccaagtgtaatttggatgatttccattaatatcaactcttgaagcctacttgtactgat

SEQ ID NO: 2819 - DNA, 60 bp, Artificial Sequence
  oligonucleotide probe
cctcagaaaaaatactaacttattcgttttgttcctgtctttcagtgtagaagacttctg

SEQ ID NO: 2820 - DNA, 60 bp, Artificial Sequence
  oligonucleotide probe
ggggaattcagtgaattatgtaccaggtctagtgtttggtatgttgcaagttttaaaaat

SEQ ID NO: 2821 - DNA, 60 bp, Artificial Sequence
  oligonucleotide probe
cccggtggactttgtgttcaataaaatattatgtcgtgtaataaagttatacagagtacc

SEQ ID NO: 2822 - DNA, 60 bp, Artificial Sequence
  oligonucleotide probe
cactggtttgtgtatatatggaatatgtaacatggcaacaagaactgccagagcatactc

SEQ ID NO: 2823 - DNA, 60 bp, Artificial Sequence
  oligonucleotide probe
gctagagccaaggtacttttcttttttctgatgtataggagcaaaataaccagagaattt

SEQ ID NO: 2824 - DNA, 60 bp, Artificial Sequence
  oligonucleotide probe
ctctgcccttttaagatttgtttgatcagtgcatgataatttgagtaaacagtggattga

SEQ ID NO: 2825 - DNA, 60 bp, Artificial Sequence
  oligonucleotide probe
agcccctttggacaaatgtcgctgtcagtgttacagatttcttttattgggttgtttttt

SEQ ID NO: 2826 - DNA, 60 bp, Artificial Sequence
  oligonucleotide probe
gctgcatcagacatacctagaggagctaaagaaactgttcaatgaacacaaagggaaata

SEQ ID NO: 2827 - DNA, 60 bp, Artificial Sequence
  oligonucleotide probe
ggtggcacatgtctcaaaaacacttacatatagtgctagaaataaatattagcgaagacc

SEQ ID NO: 2828 - DNA, 60 bp, Artificial Sequence
  oligonucleotide probe
atgtctgtgaaaaagcccatttggtatctgatgagcaattggaacagttttctctttttt

SEQ ID NO: 2829 - DNA, 60 bp, Artificial Sequence
  oligonucleotide probe
ctttaggcttaccactgattctgatggactctcgaatccaaagttaggagctacatttaa

SEQ ID NO: 2830 - DNA, 60 bp, Artificial Sequence
  oligonucleotide probe
ggtggtttactgtccagtctgccttatccttaatctgttcatatatttatttactaatgc

SEQ ID NO: 2831 - DNA, 60 bp, Artificial Sequence
  oligonucleotide probe
ggagaatccactcaaatgtctttccttccctttggatgaactcaagaaccaggatgggat

SEQ ID NO: 2832 - DNA, 60 bp, Artificial Sequence
  oligonucleotide probe
tatgcagcttacacccttgtatttgtgcgtttgcgtggtatttttatttcttgggatgag

SEQ ID NO: 2833 - DNA, 60 bp, Artificial Sequence
  oligonucleotide probe
gatagagatgtacaaactgtcgtaggaactatgctcgcttaataaaagcttactaaatcc

SEQ ID NO: 2834 - DNA, 60 bp, Artificial Sequence
  oligonucleotide probe
ttaccattgagtctcttccctgagagttgtttggatggcatcaaaggggttgtggtttga

SEQ ID NO: 2835 - DNA, 60 bp, Artificial Sequence
  oligonucleotide probe
gaactaaactgggtttatactggaccctccaatgaccagatgtatatagaaatttacaaa

SEQ ID NO: 2836 - DNA, 60 bp, Artificial Sequence
  oligonucleotide probe
ggggacagtacatgatttctcataatttgaattcatagtagatatagttaagggaacagc

SEQ ID NO: 2837 - DNA, 60 bp, Artificial Sequence
  oligonucleotide probe
cggacacagaaatttcgttggtttttattatgagcaaatataagttaatgccaacgctac

SEQ ID NO: 2838 - DNA, 60 bp, Artificial Sequence
  oligonucleotide probe
ttctgtaacttcaattagtacaaaggaaccttttccatgaactacctgctgttttctgat

SEQ ID NO: 2839 - DNA, 60 bp, Artificial Sequence
  oligonucleotide probe
ttcgtttctgtctaaatgtcagtgtgttcaaacccccagagggttctgtttttcccattc

SEQ ID NO: 2840 - DNA, 60 bp, Artificial Sequence
  oligonucleotide probe
cctttagctcccaagactcttttgtaaagtttttgtagtgatttttatgccacctgaata

SEQ ID NO: 2841 - DNA, 60 bp, Artificial Sequence
  oligonucleotide probe
taaaattcctttccttgagtcgctgggtttacccagtcctccaagaactccagtgaaagt

SEQ ID NO: 2842 - DNA, 60 bp, Artificial Sequence
  oligonucleotide probe
cgacctgctgttgtctggaacataagatacaaattcatgataacattgagatgtgtttaa

SEQ ID NO: 2843 - DNA, 60 bp, Artificial Sequence
  oligonucleotide probe
gcacacttgttgaatgagttaagttttgcaggagggacattttgacaagcacagaaccac

SEQ ID NO: 2844 - DNA, 60 bp, Artificial Sequence
  oligonucleotide probe
tagaggaaaagtagttatgcccatataggcggcatgagagacaagggatcagtttacctg

SEQ ID NO: 2845 - DNA, 60 bp, Artificial Sequence
  oligonucleotide probe
gatcatgcatacccacccttgggactgaagttaacccctgttctcagggtctccagaaga

SEQ ID NO: 2846 - DNA, 60 bp, Artificial Sequence
  oligonucleotide probe
gtgctctagaagaataaaactgaaaaccctagagattttcttttccgttgatgtttagtg

SEQ ID NO: 2847 - DNA, 60 bp, Artificial Sequence
  oligonucleotide probe
ggaagcagcgattttacagcctcaagtttttaaacatgatttatatgttctgtacagttg

SEQ ID NO: 2848 - DNA, 60 bp, Artificial Sequence
  oligonucleotide probe
gctgaaagaaaaagttttgaatgctgtaaagcacagtcagacggacgtatataagccgca

SEQ ID NO: 2849 - DNA, 60 bp, Artificial Sequence
  oligonucleotide probe
cgagatgagatgtcatttctgctttggagaaggcaagtttaatgaagagaaagaaaaaca

SEQ ID NO: 2850 - DNA, 60 bp, Artificial Sequence
  oligonucleotide probe
tgcaaggtgtttgcttcagaatgtacacagaaggagaagctaagaaacgaggtctggttg

SEQ ID NO: 2851 - DNA, 60 bp, Artificial Sequence
  oligonucleotide probe
gcctgatcatttcactggtggctgaaggattttagagaaacttgttcttaaaagaaaaaa

SEQ ID NO: 2852 - DNA, 60 bp, Artificial Sequence
  oligonucleotide probe
agcttttttagtcactaaagcttgggagcagtgtgaaatctttattcattcacacccttt

SEQ ID NO: 2853 - DNA, 60 bp, Artificial Sequence
  oligonucleotide probe
agaaaagtagtctttctttgctccccatttctcggcttctggaaatttgtgtgggaaagt

SEQ ID NO: 2854 - DNA, 60 bp, Artificial Sequence
  oligonucleotide probe
tccctcctggaaaccatttttacagttgtatggcttgaacaaattaaagctagttttggt

SEQ ID NO: 2855 - DNA, 60 bp, Artificial Sequence
  oligonucleotide probe
cctgcattggaaacttgaagactactttgaaacagactgttcctattcagatacaaataa

SEQ ID NO: 2856 - DNA, 60 bp, Artificial Sequence
  oligonucleotide probe
caactgatggtataaccctgtgcacctttgaaaagattttggttttaaattgctgctttt

SEQ ID NO: 2857 - DNA, 60 bp, Artificial Sequence
  oligonucleotide probe
atcctgcacaaatatttctgactggtcctattttctgaaacactgttaccatatgctgtg

SEQ ID NO: 2858 - DNA, 60 bp, Artificial Sequence
  oligonucleotide probe
ttgaccatatttggccttagacacttaggtctgacaagtagtaagtaatgagatcactct

SEQ ID NO: 2859 - DNA, 60 bp, Artificial Sequence
  oligonucleotide probe
ctgttgcaaattctctgtcttgggtgaacttgagatgggtgaagtaaatgatgcaaatgc

SEQ ID NO: 2860 - DNA, 60 bp, Artificial Sequence
  oligonucleotide probe
tttagccagccttcatgtagaagacacatggaaacacagaagtaaacttttatggaattc

SEQ ID NO: 2861 - DNA, 60 bp, Artificial Sequence
  oligonucleotide probe
tattttgtcactgtaagaggttttttggcacagacaagcaagtcagaaatccagctgact

SEQ ID NO: 2862 - DNA, 60 bp, Artificial Sequence
  oligonucleotide probe
gggggcttgccacatacttgccaaaagcctgtaattctagcattaaacaacatctgacac

SEQ ID NO: 2863 - DNA, 60 bp, Artificial Sequence
  oligonucleotide probe
cggcatgagaagtgtttggagttttttctttagttaagtgcagtaggtttgaaacttttt

SEQ ID NO: 2864 - DNA, 60 bp, Artificial Sequence
  oligonucleotide probe
gctctgtaattaattaactaaagtggatcaaatgagaaggtgaaagttcacagaggaaca

SEQ ID NO: 2865 - DNA, 60 bp, Artificial Sequence
  oligonucleotide probe
ttccagggagctcttagaaatgatgacacacaggactcagtacctttgcttttatggctg

SEQ ID NO: 2866 - DNA, 60 bp, Artificial Sequence
  oligonucleotide probe
cttcaagtattggaggaagacagttacaaccgcttcaagagtttcatcttttcagagcag

SEQ ID NO: 2867 - DNA, 60 bp, Artificial Sequence
  oligonucleotide probe
cttgacttggtttaaacactctcttcaatttacaacctctgaatgacatttgggtatcat

SEQ ID NO: 2868 - DNA, 60 bp, Artificial Sequence
  oligonucleotide probe
atgcacttgtgcatatgaaataataccatcagcagtcttactcaaggcagcaactgctag

SEQ ID NO: 2869 - DNA, 60 bp, Artificial Sequence
  oligonucleotide probe
gcccttataaatgtatacagctggtatgtaacaatgtgaagattccttacctgacttaat

SEQ ID NO: 2870 - DNA, 60 bp, Artificial Sequence
  oligonucleotide probe
attttggaattctgcaatgtctaagcattactacacagaccgttggaaattgcatacttt

SEQ ID NO: 2871 - DNA, 60 bp, Artificial Sequence
  oligonucleotide probe
cttcagtactataaaataaaatgttgaactaaggtacattaacttctgggggaggggaat

SEQ ID NO: 2872 - DNA, 60 bp, Artificial Sequence
  oligonucleotide probe
ccactgttccccaatcagcctcaaacttctactgtttttatcctaattaaacttatgaaa

SEQ ID NO: 2873 - DNA, 60 bp, Artificial Sequence
  oligonucleotide probe
tttattctaacagtttgcacatttgttattattttacataaatgagtatctaccgggggg

SEQ ID NO: 2874 - DNA, 60 bp, Artificial Sequence
  oligonucleotide probe
agagtgggatgggtgagtgctgaaaaataaacttttgttacgattccattagcaaaaagc

SEQ ID NO: 2875 - DNA, 60 bp, Artificial Sequence
  oligonucleotide probe
ctggccttggtttacaatgctgttaggtacattaaccaatgaataaagtgatcaattttc

SEQ ID NO: 2876 - DNA, 60 bp, Artificial Sequence
  oligonucleotide probe
tcccacctgtgacaatccagaagcttaaaaggaaacttcttccccagagatcagctctaa

SEQ ID NO: 2877 - DNA, 60 bp, Artificial Sequence
  oligonucleotide probe
agctgagaagcagctctcaggccacaaacaaccaataaagaacagaacaaatctgtctcc

SEQ ID NO: 2878 - DNA, 60 bp, Artificial Sequence
  oligonucleotide probe
gccaggctggcacaggaatggggaggcttgccttttataaatattatacacaagaaaaaa

SEQ ID NO: 2879 - DNA, 60 bp, Artificial Sequence
  oligonucleotide probe
gctcagttcctagtgcttatcgctcttcctagttttgcttatgctactgtaatatttttg

SEQ ID NO: 2880 - DNA, 60 bp, Artificial Sequence
  oligonucleotide probe
gaccaccataatttgtattatgtctcctgattcaatgaaggtttcctgtagatttgctaa

SEQ ID NO: 2881 - DNA, 60 bp, Artificial Sequence
  oligonucleotide probe
gagtctccgagagggatgaaattcaagtccttttatgccataaaaacaagatgagtcttt

SEQ ID NO: 2882 - DNA, 60 bp, Artificial Sequence
  oligonucleotide probe
tgactcgagagaaagatgaagatgctgtgcagtttgctaacagagtgaagtctgccattg

SEQ ID NO: 2883 - DNA, 60 bp, Artificial Sequence
  oligonucleotide probe
gaggtgtaagactccctcctactggcaataaaaggggctctttacatcacttgcaaaaaa

SEQ ID NO: 2884 - DNA, 60 bp, Artificial Sequence
  oligonucleotide probe
ccttgtgtgcttatatcaaagcactactagacatggcaataaaagaatttcttttccagt

SEQ ID NO: 2885 - DNA, 60 bp, Artificial Sequence
  oligonucleotide probe
gtaacctgtcccgccgttgaggctatctgaagtgtattgtatgaagtatcaagaacgaat

SEQ ID NO: 2886 - DNA, 60 bp, Artificial Sequence
  oligonucleotide probe
ggattgcttttctatgtgacgcatggatttaactgttgcgaaactagaacggaaatgtcc

SEQ ID NO: 2887 - DNA, 60 bp, Artificial Sequence
  oligonucleotide probe
tgggctcagtctaacttaaaggtgtgaagatgtagctaggtattttaaagttccccttag

SEQ ID NO: 2888 - DNA, 60 bp, Artificial Sequence
  oligonucleotide probe
ttggatcatgttgatctgttcctaaagttcactgtaacatctcaggatctatttgtacgc

SEQ ID NO: 2889 - DNA, 60 bp, Artificial Sequence
  oligonucleotide probe
cccaaccccaatctcagctgaggcaaacagagtgaataataaatcaagcctgtaactgac

SEQ ID NO: 2890 - DNA, 60 bp, Artificial Sequence
  oligonucleotide probe
ggttaggaacctgtacaccttcactatttcctctctcccctctataagttgctgaaatca

SEQ ID NO: 2891 - DNA, 60 bp, Artificial Sequence
  oligonucleotide probe
tccccagcccttgtcattttactgccttttttatactgacagaaaccaggtgccttcaga

SEQ ID NO: 2892 - DNA, 60 bp, Artificial Sequence
  oligonucleotide probe
gttgtcttgcatatgtacgccggtcaattagttttcctgtcaaaaaaggcattgtcctct

SEQ ID NO: 2893 - DNA, 60 bp, Artificial Sequence
  oligonucleotide probe
cttacccaatgtacaacgttctgactacttgaatacatttgagtttatggacaaacttgg

SEQ ID NO: 2894 - DNA, 60 bp, Artificial Sequence
  oligonucleotide probe
ggttttcctgcattttttacttttcgaaaatagaggtttaggctgagaattctaaacgca

SEQ ID NO: 2895 - DNA, 60 bp, Artificial Sequence
  oligonucleotide probe
gtttctgtttgttatgtgtaagacctgtatggtaactgtacattgacagttaattgtgtc

SEQ ID NO: 2896 - DNA, 60 bp, Artificial Sequence
  oligonucleotide probe
gcaatgacctggaagtgtggagatctctctgtcactaaccacctaggacttctgggaaga

SEQ ID NO: 2897 - DNA, 60 bp, Artificial Sequence
  oligonucleotide probe
aactttggctatgagatgtaatcaccttgccttcctctctagcattctgcaggagtgatg

SEQ ID NO: 2898 - DNA, 60 bp, Artificial Sequence
  oligonucleotide probe
cgggtgtcctaagacattctctattttaaactgagccttctttttaatgtaaataagctc

SEQ ID NO: 2899 - DNA, 60 bp, Artificial Sequence
  oligonucleotide probe
cagttgtagtcacttgatactgcattccgaacttgagtctattgaatccagaatgtgaat

SEQ ID NO: 2900 - DNA, 60 bp, Artificial Sequence
  oligonucleotide probe
agaaccgtatatggccctgacccatgagttatggtacgtgttctttcctgaatggtagtt

SEQ ID NO: 2901 - DNA, 60 bp, Artificial Sequence
  oligonucleotide probe
ccctgatctctatacctacttcaccatgctcaagagcatctgtgtagaagtggaccacgg

SEQ ID NO: 2902 - DNA, 60 bp, Artificial Sequence
  oligonucleotide probe
caagtcccacagtaagcttcacaataaagttgattgtttcagaatcaaaaaggaaaacac

SEQ ID NO: 2903 - DNA, 60 bp, Artificial Sequence
  oligonucleotide probe
aaatgcacgatgtagaagcagaggattggtaatatattttgttcctaccctcgttcctgc

SEQ ID NO: 2904 - DNA, 60 bp, Artificial Sequence
  oligonucleotide probe
cacgcgggtgacatacattttatattttcttaataaaaaggagaaagaaaagcaccagag

SEQ ID NO: 2905 - DNA, 60 bp, Artificial Sequence
  oligonucleotide probe
ccatcacagatgtcacatgtgtgctagtccagaaatagaagaacatttgtcagctccgac

SEQ ID NO: 2906 - DNA, 60 bp, Artificial Sequence
  oligonucleotide probe
cctggggatgatattattgaaactggtcaacaaaataccatggatcaaagtgcaaagtct

SEQ ID NO: 2907 - DNA, 60 bp, Artificial Sequence
  oligonucleotide probe
attttcaaaacgtactgcctttaggaacgtgggtgaagctggagctcacaagcacagtaa

SEQ ID NO: 2908 - DNA, 60 bp, Artificial Sequence
  oligonucleotide probe
agatctctgactgtaaacaagagtctttctttattcttcagtctgcttgatgtgttgttg

SEQ ID NO: 2909 - DNA, 60 bp, Artificial Sequence
  oligonucleotide probe
caggcattctcagggactgacttaaacacacaaatcaatgtcaaggatcaagttatgctc

SEQ ID NO: 2910 - DNA, 60 bp, Artificial Sequence
  oligonucleotide probe
ccggtacacacaacatatgttcagttgttcttaactacttttgtcatttgttttttggag

SEQ ID NO: 2911 - DNA, 60 bp, Artificial Sequence
  oligonucleotide probe
tcaggtgggcccttggtctgtgagaagaatggtgtggcttacctgtatggcatcatcagc

SEQ ID NO: 2912 - DNA, 60 bp, Artificial Sequence
  oligonucleotide probe
gctaaaaacagtgtgagaagctcagattcatgtatatacttgattggaatgaggtcttat

SEQ ID NO: 2913 - DNA, 60 bp, Artificial Sequence
  oligonucleotide probe
ggaacacctgagaaagagtgtgtgaatgatgtttctatcctagttgctcatctgcatgtc

SEQ ID NO: 2914 - DNA, 60 bp, Artificial Sequence
  oligonucleotide probe
agaggtcacacattactggaaagatactaagaaccaagaagacttttggcttcctagaga

SEQ ID NO: 2915 - DNA, 60 bp, Artificial Sequence
  oligonucleotide probe
acttgcatctcaaaaagctccaataatcttagcaggacaagacagctcaaatggcatgct

SEQ ID NO: 2916 - DNA, 60 bp, Artificial Sequence
  oligonucleotide probe
tgatgaggcaagatgcattgggttctgtctacttcatacctgtctgacgtgttagaataa

SEQ ID NO: 2917 - DNA, 60 bp, Artificial Sequence
  oligonucleotide probe
agagttgaacaagtactggactgctacaacaggtccttatgtatagattggcccaggaag

SEQ ID NO: 2918 - DNA, 60 bp, Artificial Sequence
  oligonucleotide probe
ttgtggaccaacacacaaaattagcaagcttacatagaatattaaactgttcttgcagtc

SEQ ID NO: 2919 - DNA, 60 bp, Artificial Sequence
  oligonucleotide probe
ttgcttttgtgacattcattgtagccctcattgtaaagtgcttcttgtttgtttaccgat

SEQ ID NO: 2920 - DNA, 60 bp, Artificial Sequence
  oligonucleotide probe
ttcagtgagactaaacacctactagacacggactgactcagatttcatacacgtgagatc

SEQ ID NO: 2921 - DNA, 60 bp, Artificial Sequence
  oligonucleotide probe
gagcttacttcctttgacctcttgatatttccttagaattccccaagtctcactttggag

SEQ ID NO: 2922 - DNA, 60 bp, Artificial Sequence
  oligonucleotide probe
aagatagtaggaagtagattccctgtcctggcaattttgtcattcgtcctgagtgaggag

SEQ ID NO: 2923 - DNA, 60 bp, Artificial Sequence
  oligonucleotide probe
acaagtttatttaaaaccattttgtttcccaagttgctgaataaacaaacctgctccagg

SEQ ID NO: 2924 - DNA, 60 bp, Artificial Sequence
  oligonucleotide probe
ctggacttgagagaatttgcttcagaaaacaccaaccatgctgtttacaacctgtatgct

SEQ ID NO: 2925 - DNA, 60 bp, Artificial Sequence
  oligonucleotide probe
ggaactgttccacttgaacccgggagctttaaagctttatttatttatagcttcttatta

SEQ ID NO: 2926 - DNA, 60 bp, Artificial Sequence
  oligonucleotide probe
ctgaccttcccactgagaaacacatgttcatttatgtgatcatgtatagatttcagaata

SEQ ID NO: 2927 - DNA, 60 bp, Artificial Sequence
  oligonucleotide probe
cgctttacctgtaagctcttaggaattgtgtccatacctcatgttctatcaaaatagagg

SEQ ID NO: 2928 - DNA, 60 bp, Artificial Sequence
  oligonucleotide probe
tttgcagactacgaagcctatgtcaagtgtcaagaaaaagtcagtcagctgtatatgaat

SEQ ID NO: 2929 - DNA, 60 bp, Artificial Sequence
  oligonucleotide probe
cacaatcatctcaaggtggaaatacattaagttgggtattaagctgagtccaaatattca

SEQ ID NO: 2930 - DNA, 60 bp, Artificial Sequence
  oligonucleotide probe
ctggggcttgggaatactgcctgtgtttggccattaaaaaggcaccatctccataaaaaa

SEQ ID NO: 2931 - DNA, 60 bp, Artificial Sequence
  oligonucleotide probe
tacacataaacccccgcataggtgactgtttggttcgcaacagctatatgaatggctctt

SEQ ID NO: 2932 - DNA, 60 bp, Artificial Sequence
  oligonucleotide probe
agtctacaggctggtcttgctccttccttcctctacacccctttatgtcaccatggcaaa

SEQ ID NO: 2933 - DNA, 60 bp, Artificial Sequence
  oligonucleotide probe
gacactttcagttctaattgcccttagactttatttccagctcttatgtcatggaaaata

SEQ ID NO: 2934 - DNA, 60 bp, Artificial Sequence
  oligonucleotide probe
gctacttgaagttagaatgtcaattttgtacctcctgattcatttccatattgtagtagc

SEQ ID NO: 2935 - DNA, 60 bp, Artificial Sequence
  oligonucleotide probe
gacgtagcatctcgtggtaattccctaaggtgattttgtatattgaccttaaatattgta

SEQ ID NO: 2936 - DNA, 60 bp, Artificial Sequence
  oligonucleotide probe
cagtaccttcaatatggtaaagatgttgtcttcagatgaatggctcatattttggtgcag

SEQ ID NO: 2937 - DNA, 60 bp, Artificial Sequence
  oligonucleotide probe
gcctgttttactcaatgcatcataccatgtagtttgatgtttccattttggtttctgaat

SEQ ID NO: 2938 - DNA, 60 bp, Artificial Sequence
  oligonucleotide probe
cctctttttctatcagtgtaaaaggaatacaagatagctagttgcaaatgctgaatgcat

SEQ ID NO: 2939 - DNA, 60 bp, Artificial Sequence
  oligonucleotide probe
ttcctgaaggccagaatccttagctgtccaatcctatttgtgctggataagacctggaaa

SEQ ID NO: 2940 - DNA, 60 bp, Artificial Sequence
  oligonucleotide probe
cacttaaaaatttgggggtactttggtaactgattaaaaatggcagttttctgaacttcc

SEQ ID NO: 2941 - DNA, 60 bp, Artificial Sequence
  oligonucleotide probe
tgggtatttatatctgaaccagacagaaagatgcttgaatcaggcactatgttgaaaaaa

SEQ ID NO: 2942 - DNA, 60 bp, Artificial Sequence
  oligonucleotide probe
tgtctgtatgtttaaaagatagcatctagaatgatcacttgtgcttagcgtagcattgta

SEQ ID NO: 2943 - DNA, 60 bp, Artificial Sequence
  oligonucleotide probe
gctggcccaacatagcaccttatcttttggataagtactatgttgtatttataccaatta

SEQ ID NO: 2944 - DNA, 60 bp, Artificial Sequence
  oligonucleotide probe
ctgtaaaaatgtgttaatcacaagaaacataccacaaaccatcagaaagatttggcctag

SEQ ID NO: 2945 - DNA, 60 bp, Artificial Sequence
  oligonucleotide probe
acgctatgtcattctgaggtctaactggactaaccaaccaatatgtaaactggaggaaaa

SEQ ID NO: 2946 - DNA, 60 bp, Artificial Sequence
  oligonucleotide probe
tctacaccaaggtactgaattatgttgactggatcaagaaagagatgggagacgaaaact

SEQ ID NO: 2947 - DNA, 60 bp, Artificial Sequence
  oligonucleotide probe
cagaagctcatgagtagcttagtttgaaatgtctttgatgtcaaaagtactttgtctcaa

SEQ ID NO: 2948 - DNA, 60 bp, Artificial Sequence
  oligonucleotide probe
tttccattcatccagagttactgcaagcatgtacgtatcctccaagacttggctgaagct

SEQ ID NO: 2949 - DNA, 60 bp, Artificial Sequence
  oligonucleotide probe
atgaaatgtgtttcaatcaacctgaacatgagttaaaaggaaagagatgtggcttttgtg

SEQ ID NO: 2950 - DNA, 60 bp, Artificial Sequence
  oligonucleotide probe
ccttggggcagattatttcagaacaggatttttgaaagtctgggcttcatatttgctgag

SEQ ID NO: 2951 - DNA, 60 bp, Artificial Sequence
  oligonucleotide probe
catctgccatttgtcctggaattgtcacggtcccttggtgtcagcagcagtaacttggtg

SEQ ID NO: 2952 - DNA, 60 bp, Artificial Sequence
  oligonucleotide probe
cctgcaggtagaaatgtcccttgggagaattaagtattgttgactcaaataaagcctgag

SEQ ID NO: 2953 - DNA, 60 bp, Artificial Sequence
  oligonucleotide probe
cttcgtctgacctgtatctctctattgccttcctactagttattaaacttgctggtttgt

SEQ ID NO: 2954 - DNA, 60 bp, Artificial Sequence
  oligonucleotide probe
cctggacctaagatgcttagagaaaaacagaaagtgtatatttatattctagaatggtgg

SEQ ID NO: 2955 - DNA, 60 bp, Artificial Sequence
  oligonucleotide probe
ggacaacttttgaaaagagaaacttttattccttttgggataggtcagttaaagcttggt

SEQ ID NO: 2956 - DNA, 60 bp, Artificial Sequence
  oligonucleotide probe
tgatatcgagggatttttgcaaagacagtgaggattgtgattacagatagagccccaagc

SEQ ID NO: 2957 - DNA, 60 bp, Artificial Sequence
  oligonucleotide probe
tgaacactgccttatggccaggatagtgtttcactgttacagaataagctggctctggaa

SEQ ID NO: 2958 - DNA, 60 bp, Artificial Sequence
  oligonucleotide probe
ggtggcactgaacaatgtggcagagtttatatgcaaatacaaactattataaagtctttc

SEQ ID NO: 2959 - DNA, 60 bp, Artificial Sequence
  oligonucleotide probe
taaaacacaggatcaacgtcaagttcgatgcagttgttgggtacaaagacaagtgacgca

SEQ ID NO: 2960 - DNA, 60 bp, Artificial Sequence
  oligonucleotide probe
attcaagtttgtaattctttgggaatttgtgggtcgtaaaaactgcagtattcaaagcct

SEQ ID NO: 2961 - DNA, 60 bp, Artificial Sequence
  oligonucleotide probe
agggttataatgcactgagatccagaagttggaaaactcaataaatgtacaaacgaaagc

SEQ ID NO: 2962 - DNA, 60 bp, Artificial Sequence
  oligonucleotide probe
taagattctgaaggtgctactattttctgttgccacaggctttaaagaaactttctgaat

SEQ ID NO: 2963 - DNA, 60 bp, Artificial Sequence
  oligonucleotide probe
ggtaccagaaaattctatggacaatccctaaatttattgtaatccaagtgaggaaacaga

SEQ ID NO: 2964 - DNA, 60 bp, Artificial Sequence
  oligonucleotide probe
tgtgggttctgtatttatccatttggcttgaagctttgtttatatatcggctgctttttt

SEQ ID NO: 2965 - DNA, 60 bp, Artificial Sequence
  oligonucleotide probe
gtttttctttgacttccgacattgctggtgacattgctggtgctgttcccctgagaatta

SEQ ID NO: 2966 - DNA, 60 bp, Artificial Sequence
  oligonucleotide probe
gcttcagccgtgtttatttggacatcttggaactactgtttaataaagatggattttgaa

SEQ ID NO: 2967 - DNA, 60 bp, Artificial Sequence
  oligonucleotide probe
ttggaagagtgtataggaagagtattctcaaaatgtgatgattacatatcaccctaatcc

SEQ ID NO: 2968 - DNA, 60 bp, Artificial Sequence
  oligonucleotide probe
tttattccagtctgtatggttacgcctaaagagagaaaagtctcagctaatctcagggat

SEQ ID NO: 2969 - DNA, 60 bp, Artificial Sequence
  oligonucleotide probe
cgatgcacataggaataggttctaaaagttgaaatacatattcttcctttcccaaatgtc

SEQ ID NO: 2970 - DNA, 60 bp, Artificial Sequence
  oligonucleotide probe
tcagggccttaacctgttcaggagaagtagaggaaatgccaaatactcttcttgctctca

SEQ ID NO: 2971 - DNA, 60 bp, Artificial Sequence
  oligonucleotide probe
ctgctctgagagtgaaattgggccttctgtaaatatgtgaagtgtggtttcttttcaaac

SEQ ID NO: 2972 - DNA, 60 bp, Artificial Sequence
  oligonucleotide probe
caggttcctggttattcctgacttctagataattaaaattctactacctggtgtttcttt

SEQ ID NO: 2973 - DNA, 60 bp, Artificial Sequence
  oligonucleotide probe
aatgtgattttgtcacaaaaacaatatacagtatcatccctttccatccatggactccat

SEQ ID NO: 2974 - DNA, 60 bp, Artificial Sequence
  oligonucleotide probe
gccacaattccataggtttatttttactcttggaattaggaaaatcaattcagagcactc

SEQ ID NO: 2975 - DNA, 60 bp, Artificial Sequence
  oligonucleotide probe
ggagttttatactacgtctacggagtgaggaaagaaaaagaaattactttcagtagtaga

SEQ ID NO: 2976 - DNA, 60 bp, Artificial Sequence
  oligonucleotide probe
aagaagaagaaagtttccagataacttgtggcctccaaccactcaactgtcagcacactg

SEQ ID NO: 2977 - DNA, 60 bp, Artificial Sequence
  oligonucleotide probe
tgtttacagccatgttcagcttctgaggtgaaatgagaagcagcagcagagagaacaaac

SEQ ID NO: 2978 - DNA, 60 bp, Artificial Sequence
  oligonucleotide probe
gagaccatttatacattcagctgatgacaactttggtcaagatcccaacatagaagacag

SEQ ID NO: 2979 - DNA, 60 bp, Artificial Sequence
  oligonucleotide probe
gccacttgactgtgagactcctacttgctttatcatcaattatgcttttataaattgtgt

SEQ ID NO: 2980 - DNA, 60 bp, Artificial Sequence
  oligonucleotide probe
aattatggtggacctattaccccatgggtaagaaataaatggaaatatgacatcggatgt

SEQ ID NO: 2981 - DNA, 60 bp, Artificial Sequence
  oligonucleotide probe
gtttccagacatatctgttgcaatctctgtcttcttgtctctctctgttaataaaaacat

SEQ ID NO: 2982 - DNA, 60 bp, Artificial Sequence
  oligonucleotide probe
agattgaactctggactaaacacggaagaagccagttaagagaaggactagaaagccctc

SEQ ID NO: 2983 - DNA, 60 bp, Artificial Sequence
  oligonucleotide probe
tataaataacaaagtgtctgaaatgtatttcctgaaataaatgtttcaaatctcgtgccg

SEQ ID NO: 2984 - DNA, 60 bp, Artificial Sequence
  oligonucleotide probe
ccttggatgcctcattgctttgaatggattcatttttgcttataagctgatttactgaaa

SEQ ID NO: 2985 - DNA, 60 bp, Artificial Sequence
  oligonucleotide probe
gtggaagtcgttcataattacaactaagtgattcattctctttctgctctcttcacttta

SEQ ID NO: 2986 - DNA, 60 bp, Artificial Sequence
  oligonucleotide probe
ccgaagaacgtcatgatgcagacaaatacatttatatttttaagaaaaagctagccttcc

SEQ ID NO: 2987 - DNA, 60 bp, Artificial Sequence
  oligonucleotide probe
ctttttgtgtatgttcattgtttctcagtattactgcttgaataattctctgtacagggg

SEQ ID NO: 2988 - DNA, 60 bp, Artificial Sequence
  oligonucleotide probe
ctggagagtgcaacagacacttaataaggatacaactaggaagatttagtatagagaatg

SEQ ID NO: 2989 - DNA, 60 bp, Artificial Sequence
  oligonucleotide probe
aaagggagcttagatctcctttatgctagcagcactgagatttgtcatgcaggtctcagt

SEQ ID NO: 2990 - DNA, 60 bp, Artificial Sequence
  oligonucleotide probe
tggagggtctgattttttaaggaaaagattgcagaaagggcaaaagtattttgattctgg

SEQ ID NO: 2991 - DNA, 60 bp, Artificial Sequence
  oligonucleotide probe
aagcaatgctagtgtggatagactcgtgtgaagaacaggaaataaatgtcttctttctgg

SEQ ID NO: 2992 - DNA, 60 bp, Artificial Sequence
  oligonucleotide probe
tcagagtgttcttggaataagaaatattgaatgaggaagctttgagagacagatgcaaag

SEQ ID NO: 2993 - DNA, 60 bp, Artificial Sequence
  oligonucleotide probe
aagaaccacccattgtgttactaggagttttcaaataaaccagttgggtgttttacagtc

SEQ ID NO: 2994 - DNA, 60 bp, Artificial Sequence
  oligonucleotide probe
gaatgtatggctcagtgtactttacagttagattgaacttcatagtaaatggtagcatgt

SEQ ID NO: 2995 - DNA, 60 bp, Artificial Sequence
  oligonucleotide probe
tgaaagagaacaatgacattgaagagggaggcagtagacagtccctgatggaaatgcagt

SEQ ID NO: 2996 - DNA, 60 bp, Artificial Sequence
  oligonucleotide probe
atatacccacaaggtggtgggtgcggcagtaggcacgtttgcctggtaccttacctatgg

SEQ ID NO: 2997 - DNA, 60 bp, Artificial Sequence
  oligonucleotide probe
cctaagtatggggtcctaaatgttctgggaatttagaaaaaacttaattggattccattg

SEQ ID NO: 2998 - DNA, 60 bp, Artificial Sequence
  oligonucleotide probe
ccccaaggtatctcttgcaggtttgaaaaagagaaggaactaaaatgcttatttttatac

SEQ ID NO: 2999 - DNA, 60 bp, Artificial Sequence
  oligonucleotide probe
ccttttcctgactcggtgtatggatctgtggtcatttcctctgcagaaagaataaagact

SEQ ID NO: 3000 - DNA, 60 bp, Artificial Sequence
  oligonucleotide probe
tgctgtagagaggtcctgcttagtattgactgacttccctcctttcacataaaggaggaa

SEQ ID NO: 3001 - DNA, 60 bp, Artificial Sequence
  oligonucleotide probe
gtggacaacctagaacgagtctttggaaacatccaagtgaaataataaaactctattttc

SEQ ID NO: 3002 - DNA, 60 bp, Artificial Sequence
  oligonucleotide probe
ctgcaaaagaaagtagagatagcctcaatttactacgattctgctttatttggagagctt

SEQ ID NO: 3003 - DNA, 60 bp, Artificial Sequence
  oligonucleotide probe
atgagtatattctggaggttagcaggtatttgtacaattcaattaaagtactccttccct

SEQ ID NO: 3004 - DNA, 60 bp, Artificial Sequence
  oligonucleotide probe
caaaaaagaagaagaagagtcactaggtcaagatgaggatcaaagctgacattatgactc

SEQ ID NO: 3005 - DNA, 60 bp, Artificial Sequence
  oligonucleotide probe
gaaggagaccagtcatgagtaccaaggaatttgtcagcttggttctagaacttagcagag

SEQ ID NO: 3006 - DNA, 60 bp, Artificial Sequence
  oligonucleotide probe
cgagatggtcaagatgtctgaagctacacactattgttgttaacctaatactccacgagg

SEQ ID NO: 3007 - DNA, 60 bp, Artificial Sequence
  oligonucleotide probe
gacctgcttttcagtgatgacacagaatgtttatctaaccttcagaacaaaacaacatat

SEQ ID NO: 3008 - DNA, 60 bp, Artificial Sequence
  oligonucleotide probe
ctggagacacctgaaaccttgctatccgacccattaaactgttgtattgtttcgaaaaaa

SEQ ID NO: 3009 - DNA, 60 bp, Artificial Sequence
  oligonucleotide probe
cacactgtattattgtaacttatttaatgaagtcagaagcagtagacagatgttggtgca

SEQ ID NO: 3010 - DNA, 60 bp, Artificial Sequence
  oligonucleotide probe
gaccaagttgtgagccagatacagaacttcaggttttaagtgaaaataaaagcaggaaaa

SEQ ID NO: 3011 - DNA, 60 bp, Artificial Sequence
  oligonucleotide probe
gcttcagtttcccttcttaatgtacatggttgttttccatctccacataaatttggcccc

SEQ ID NO: 3012 - DNA, 60 bp, Artificial Sequence
  oligonucleotide probe
attctggctgccagccacttatctgtgtcttgaaggaaatgtatggataacagagtgtcc

SEQ ID NO: 3013 - DNA, 60 bp, Artificial Sequence
  oligonucleotide probe
tttttccctctcctttccctaactgcagaacttacaggaaaggaataagtgtccctcagg

SEQ ID NO: 3014 - DNA, 60 bp, Artificial Sequence
  oligonucleotide probe
aactgcaacactcttaactcgtgacataacaaagactgagggagcccaaaggagactaag

SEQ ID NO: 3015 - DNA, 60 bp, Artificial Sequence
  oligonucleotide probe
aaggctggttccctttttcctgattcggtgtatgaatctgtgttcatttcttttgcagaa

SEQ ID NO: 3016 - DNA, 60 bp, Artificial Sequence
  oligonucleotide probe
gacccagttttttagggaacgcaaatgatttattatccagatacttggatagttcctttt

SEQ ID NO: 3017 - DNA, 60 bp, Artificial Sequence
  oligonucleotide probe
gctatttgctcaatttgggcatatcccactatactgtacattttaatatgctgtgttaca

SEQ ID NO: 3018 - DNA, 60 bp, Artificial Sequence
  oligonucleotide probe
gaagccttattaggaaccacaaataaaatacttgctttgccctcatgggtagaggatgtg

SEQ ID NO: 3019 - DNA, 60 bp, Artificial Sequence
  oligonucleotide probe
cttgtatacagagctattttaaagaaattgcgagtggcaccatggtattttttgtggagc

SEQ ID NO: 3020 - DNA, 60 bp, Artificial Sequence
  oligonucleotide probe
ctggcaagcaaatgtgttgagttcttaaatctttgttcggtttttctgttcagagtttta

SEQ ID NO: 3021 - DNA, 60 bp, Artificial Sequence
  oligonucleotide probe
tcatccgcaagttctatacagagtttgatcggcataacaatcgcattggattcgccttgg

SEQ ID NO: 3022 - DNA, 60 bp, Artificial Sequence
  oligonucleotide probe
ctaaaagaccttcaaaccacagtgtaaatgctaactaaccatattggtatgtaaccagaa

SEQ ID NO: 3023 - DNA, 60 bp, Artificial Sequence
  oligonucleotide probe
agacaggatctaagttttgttacagcaagctgcctggatgaagttctaaatgcagctttt

SEQ ID NO: 3024 - DNA, 60 bp, Artificial Sequence
  oligonucleotide probe
cctgttactgagcaatttggcaagcagcttttaaaaacatatgaaaatattttccccaag

SEQ ID NO: 3025 - DNA, 60 bp, Artificial Sequence
  oligonucleotide probe
ttagcagataggaaatggcttttctgacttaaatatctaggaagggtaatgaaaactgtg

SEQ ID NO: 3026 - DNA, 60 bp, Artificial Sequence
  oligonucleotide probe
ccactggtcctgaaacaaaaccatggatatcattgtgttcatacagagagcaagtctggg

SEQ ID NO: 3027 - DNA, 60 bp, Artificial Sequence
  oligonucleotide probe
ctggctaccaagataaccctgatgtattgattccataaatgcatcacattcagttttacc

SEQ ID NO: 3028 - DNA, 60 bp, Artificial Sequence
  oligonucleotide probe
cctgcgcaagaagaagaagaatgtgaagaaacaccgtcgagatcggtctgattctgggtc

SEQ ID NO: 3029 - DNA, 60 bp, Artificial Sequence
  oligonucleotide probe
gttgctacctcattctcttaagagttcagctgtattctgcaaataaaatgcttgaaaccg

SEQ ID NO: 3030 - DNA, 60 bp, Artificial Sequence
  oligonucleotide probe
tgccatatattttatggatattcttttaggccacctagctagttcacttggaaaataacg

SEQ ID NO: 3031 - DNA, 60 bp, Artificial Sequence
  oligonucleotide probe
cttctggtctttctaagcaaagtgtgaataggatttttactccctttgtacagtattctg

SEQ ID NO: 3032 - DNA, 60 bp, Artificial Sequence
  oligonucleotide probe
ttgactgagactcattgagtttgaggtgtctttaggaaaggaagaaagaagggaacaaaa

SEQ ID NO: 3033 - DNA, 60 bp, Artificial Sequence
  oligonucleotide probe
ttgtggccaggaaccgaaagccaattgaaaaggtgttggatgtagactttgcgataaagg

SEQ ID NO: 3034 - DNA, 60 bp, Artificial Sequence
  oligonucleotide probe
gttccaggtttatgaagcagattcccaaaggctcaaaaataaaatgaccaaagtgaaaaa

SEQ ID NO: 3035 - DNA, 60 bp, Artificial Sequence
  oligonucleotide probe
tggcttagaaggcactcagagaatatgtgttattcgtgctcacggaaagtttcttactca

SEQ ID NO: 3036 - DNA, 60 bp, Artificial Sequence
  oligonucleotide probe
actgttatccccctaccatcgggagctttcgtttcctgtcagtgaagagattttacattg

SEQ ID NO: 3037 - DNA, 60 bp, Artificial Sequence
  oligonucleotide probe
gccacattatctacccttgatcttactagtcttgtatctctctgaaataaatcatttcca

SEQ ID NO: 3038 - DNA, 60 bp, Artificial Sequence
  oligonucleotide probe
gccattgtttctgtggttgtaattcttttgtctcaagatgaaaactaaacgccaatgaaa

SEQ ID NO: 3039 - DNA, 60 bp, Artificial Sequence
  oligonucleotide probe
ctgctggccatagtgcatcatgcaaacgctttgagagtaaaagaagcttcgctggctctg

SEQ ID NO: 3040 - DNA, 60 bp, Artificial Sequence
  oligonucleotide probe
cgaaatgcctgaaaacttctcttctgaattcttttatttcttgtccctaaagtccaaaac

SEQ ID NO: 3041 - DNA, 60 bp, Artificial Sequence
  oligonucleotide probe
gtgtaatagggatttaaatgactcctacattagaactcagtcttttcttacagaggccat

SEQ ID NO: 3042 - DNA, 60 bp, Artificial Sequence
  oligonucleotide probe
gggaaaaagatgcaagtatcgatgtggcttcttattctaactgaaagtctatctaatgga

SEQ ID NO: 3043 - DNA, 60 bp, Artificial Sequence
  oligonucleotide probe
gctcaaattcaggttgaaatacaaattacatttgtctgtggccattactggtttgatttc

SEQ ID NO: 3044 - DNA, 60 bp, Artificial Sequence
  oligonucleotide probe
tcaggtacagtgctgccacctaagaggattttatgataaacagtgtagcactcactccat

SEQ ID NO: 3045 - DNA, 60 bp, Artificial Sequence
  oligonucleotide probe
ggtacaactagttatcagtaactgaatgtttcttatcattacggctgcttctgtttgttt

SEQ ID NO: 3046 - DNA, 60 bp, Artificial Sequence
  oligonucleotide probe
tggtctttttcatcgtgcggatcatttcgatacctccgatgtatttcttcctttactccg

SEQ ID NO: 3047 - DNA, 60 bp, Artificial Sequence
  oligonucleotide probe
gccaccattcacacttcctatcttactttctaaataatggttttaagagaaacacagtgt

SEQ ID NO: 3048 - DNA, 60 bp, Artificial Sequence
  oligonucleotide probe
agatttctttctccatcatgctaatgccaggctcattcgtcatcctatcagcactggtct

SEQ ID NO: 3049 - DNA, 60 bp, Artificial Sequence
  oligonucleotide probe
ttattggctactgcatatcattgcaaaggactttgatgccttaagtgaacgcatccagaa

SEQ ID NO: 3050 - DNA, 60 bp, Artificial Sequence
  oligonucleotide probe
ctcacacgaactagaaatagcaggacaattcaatgtaagtagattgtagatagtgtgttt

SEQ ID NO: 3051 - DNA, 60 bp, Artificial Sequence
  oligonucleotide probe
aggaagaaacccactggaccaacttctgtcagaaaggaaaaccttgttcaaagtttcagg

SEQ ID NO: 3052 - DNA, 60 bp, Artificial Sequence
  oligonucleotide probe
catagagccgggttctgtggatttataaatactaagagttctatttttgtagggacttgc

SEQ ID NO: 3053 - DNA, 60 bp, Artificial Sequence
  oligonucleotide probe
tccctgtggaatgaagatgataaaatagaagtgaagatgatgaaagcttctgctatgctg

SEQ ID NO: 3054 - DNA, 60 bp, Artificial Sequence
  oligonucleotide probe
cagtgttttcggtgtaagacgtttagagtgtatctgacaaagtaagaataacttcaaggc

SEQ ID NO: 3055 - DNA, 60 bp, Artificial Sequence
  oligonucleotide probe
tagcaaaggtaaactgaagtctacggatcaggaggagaaagtgagatactggcctcataa

SEQ ID NO: 3056 - DNA, 60 bp, Artificial Sequence
  oligonucleotide probe
cacccatattgtcattacccaaagactgtgttaacatctccatttgttttctttgtcttg

SEQ ID NO: 3057 - DNA, 60 bp, Artificial Sequence
  oligonucleotide probe
tgttaacaaaatcaggcagtctcattccgaataggttctatgtacacgttccgatgtttt

SEQ ID NO: 3058 - DNA, 60 bp, Artificial Sequence
  oligonucleotide probe
agtatattctggaggttagcaggtatttgtacaattcaattaaagtactccttccctcct

SEQ ID NO: 3059 - DNA, 60 bp, Artificial Sequence
  oligonucleotide probe
gtcactgactcctttattaggtctgaacttcctgtctaatacctctgagcgttctcactc

SEQ ID NO: 3060 - DNA, 60 bp, Artificial Sequence
  oligonucleotide probe
tatatttgctatttacagaaagaccacggaggacgagccttctgagaaggatgccttgca

SEQ ID NO: 3061 - DNA, 60 bp, Artificial Sequence
  oligonucleotide probe
tttgatgctgctactgctgagtatgtacagaaaaagaaattccccgaggatggcagtgag

SEQ ID NO: 3062 - DNA, 60 bp, Artificial Sequence
  oligonucleotide probe
gctaaggacagggttagaagccaggggtaaagaaagatacagtctttggactaaaataaa

SEQ ID NO: 3063 - DNA, 60 bp, Artificial Sequence
  oligonucleotide probe
ccccatcttcttgtaatttaagtgactgtggtcatctgaatctgtatatagcccggcaag

SEQ ID NO: 3064 - DNA, 60 bp, Artificial Sequence
  oligonucleotide probe
acaggcagagaattttttgtgggcctttccaaaagaacaaatcaacgaggtgctgaaatc

SEQ ID NO: 3065 - DNA, 60 bp, Artificial Sequence
  oligonucleotide probe
ataacagccacttgatgaaatgtctgaccttctccacactaagatctctcaggcttctct

SEQ ID NO: 3066 - DNA, 60 bp, Artificial Sequence
  oligonucleotide probe
tgtgattgaacacccataacctgatgcggtatccaattaactcaattaaaaacagaacac

SEQ ID NO: 3067 - DNA, 60 bp, Artificial Sequence
  oligonucleotide probe
gatgaaatgtaataagcctgtcatgtgttgtctttggtttgaggttgctctatgtggacg

SEQ ID NO: 3068 - DNA, 60 bp, Artificial Sequence
  oligonucleotide probe
cctgaatctagggctgtttctttttgggtttccacttatttattacgggtatttatctta

SEQ ID NO: 3069 - DNA, 60 bp, Artificial Sequence
  oligonucleotide probe
acagtgtcttgccctgaactatacctattgcctaggccctgtcattaaatggatgtactg

SEQ ID NO: 3070 - DNA, 60 bp, Artificial Sequence
  oligonucleotide probe
gttttttgttttttctactataaaaatagctatgagttggaatttgtaaaagtttctaga

SEQ ID NO: 3071 - DNA, 60 bp, Artificial Sequence
  oligonucleotide probe
tccttccactgactctatcatgtcacacattgctgatctgctgtggccatcattaaagct

SEQ ID NO: 3072 - DNA, 60 bp, Artificial Sequence
  oligonucleotide probe
tctgagggttgattgacaggtaaactaaagaattaagaatacttagagtttgtggaggaa

SEQ ID NO: 3073 - DNA, 60 bp, Artificial Sequence
  oligonucleotide probe
attttaaagtgtgaagacacctgactggagtggactgagtgacaaccagtgtgttcaggt

SEQ ID NO: 3074 - DNA, 60 bp, Artificial Sequence
  oligonucleotide probe
gtctggcagttgacatgcgtcttagtacagctttaattttcttaggaaaaagttgaattt

SEQ ID NO: 3075 - DNA, 60 bp, Artificial Sequence
  oligonucleotide probe
tttgaccctgagagaactgaaaatgtatctggtcacaaaacatccaatactgtggctgtt

SEQ ID NO: 3076 - DNA, 60 bp, Artificial Sequence
  oligonucleotide probe
gctgctgttttcactgttggtttgtttctccttaaacaaggcctatttgttttgaaaata

SEQ ID NO: 3077 - DNA, 60 bp, Artificial Sequence
  oligonucleotide probe
ggaaatctaattcacagtattgatctacttttttgccttgtactgaatgacattacctcc

SEQ ID NO: 3078 - DNA, 60 bp, Artificial Sequence
  oligonucleotide probe
cagtattccctcagacaaaatgtttgggagaatagaaatttctggatcttttgtactatg

SEQ ID NO: 3079 - DNA, 60 bp, Artificial Sequence
  oligonucleotide probe
caggctgtaaagcctggaattgttcaatgactgcttatagctggtgatattgttacttgc

SEQ ID NO: 3080 - DNA, 60 bp, Artificial Sequence
  oligonucleotide probe
gaggatctcttacagtcaatgtcataagcctatcatattgtctaagaacaaccaaaagaa

SEQ ID NO: 3081 - DNA, 60 bp, Artificial Sequence
  oligonucleotide probe
gacagtcttaggcttttcagaataacacagacacacattcttgcttgatgtaggagcacg

SEQ ID NO: 3082 - DNA, 60 bp, Artificial Sequence
  oligonucleotide probe
cctaccaaataacaataataagtccaataacattacaaagatgggcatttcccccaatga

SEQ ID NO: 3083 - DNA, 60 bp, Artificial Sequence
  oligonucleotide probe
ccctatcgacaaacaagaaaacgaagctgcaaaggagaaggaaaggaagtacatttgaag

SEQ ID NO: 3084 - DNA, 60 bp, Artificial Sequence
  oligonucleotide probe
tggttttataatgtaaccactgtcggagtgggggagggtgacgtaccatgtatttcagtg

SEQ ID NO: 3085 - DNA, 60 bp, Artificial Sequence
  oligonucleotide probe
cacatctagacaccacgttgtatctgagtaaattttgtgccaataaatgacatcagaatt

SEQ ID NO: 3086 - DNA, 60 bp, Artificial Sequence
  oligonucleotide probe
tcagcacagaagctgtaagacaagcttctgtatttcaccgaggaataaaaataaatggag

SEQ ID NO: 3087 - DNA, 60 bp, Artificial Sequence
  oligonucleotide probe
acagttaggtgaccagaagttctcccgtgtactatgtatcacaatagtacttaagtgtga

SEQ ID NO: 3088 - DNA, 60 bp, Artificial Sequence
  oligonucleotide probe
gagactcagaggttgtgtgttatttatagctaggtgaagaagcatgagaaacagtctcat

SEQ ID NO: 3089 - DNA, 60 bp, Artificial Sequence
  oligonucleotide probe
aggcatcactggttataaaaagaacccaacctctaaacctgggaagaacagtgcctcaga

SEQ ID NO: 3090 - DNA, 60 bp, Artificial Sequence
  oligonucleotide probe
caatgtagaaagaatgtgacaaacaccttgggtagttctgtttgtgtttttgcatattgt

SEQ ID NO: 3091 - DNA, 60 bp, Artificial Sequence
  oligonucleotide probe
ctggtgtcactgacatactaaagattcctcttttaaacatgtagctatggagtaataaag

SEQ ID NO: 3092 - DNA, 60 bp, Artificial Sequence
  oligonucleotide probe
ttggatagaggcttagatgtgctctgctgcctttatgatggaataaagcttggcaagttt

SEQ ID NO: 3093 - DNA, 60 bp, Artificial Sequence
  oligonucleotide probe
ggctcaggctactatgaccaatagaagtgaaagtcttggtcataatttggggtgacatgc

SEQ ID NO: 3094 - DNA, 60 bp, Artificial Sequence
  oligonucleotide probe
tccataacttgatgactatagattgcatctaggcattccaataaaagccaacccattgtc

SEQ ID NO: 3095 - DNA, 60 bp, Artificial Sequence
  oligonucleotide probe
tatggccatttggtttcagcatgtcaggagatttctaatgatttgtggcaatatcagcaa

SEQ ID NO: 3096 - DNA, 60 bp, Artificial Sequence
  oligonucleotide probe
gttccaaactttttgaaggacatggtgaaagcgtgtcagaactaccacaagaaaacctaa

SEQ ID NO: 3097 - DNA, 60 bp, Artificial Sequence
  oligonucleotide probe
gtttaatttttattttgcatactgagggtatttggggtggggttgttttttgagatgtgt

SEQ ID NO: 3098 - DNA, 60 bp, Artificial Sequence
  oligonucleotide probe
ttctcaacactttcttggatgtgttagttttggacaaagtaggtcaactatcttcagact

SEQ ID NO: 3099 - DNA, 60 bp, Artificial Sequence
  oligonucleotide probe
ggcaagtgtgcttctggtttctgtattattctttatacagtatattcttgtagcgtaaca

SEQ ID NO: 3100 - DNA, 60 bp, Artificial Sequence
  oligonucleotide probe
ccatggggataccactgtacatccataccttcatatcaaatttttatatcccatgaaaat

SEQ ID NO: 3101 - DNA, 60 bp, Artificial Sequence
  oligonucleotide probe
acatcccaagagtactccatactgaatatgtatacacaagcctaatggtagtagtggtga

SEQ ID NO: 3102 - DNA, 60 bp, Artificial Sequence
  oligonucleotide probe
gtcctatagattcattctgtaggtgtttttgaatatgtgatcagcgaactgtagaattct

SEQ ID NO: 3103 - DNA, 60 bp, Artificial Sequence
  oligonucleotide probe
acactgtataaatttttcgttcccttgctctttgtggttgggtctaacactaactgtact

SEQ ID NO: 3104 - DNA, 60 bp, Artificial Sequence
  oligonucleotide probe
ggaattgttaagcctggatcatgaagcgttgatcttataatgattcttaaactgtatggt

SEQ ID NO: 3105 - DNA, 60 bp, Artificial Sequence
  oligonucleotide probe
ttaagattggcactgttcttgggtttgctccaaaacatctacacccgtaaggcttccatg

SEQ ID NO: 3106 - DNA, 60 bp, Artificial Sequence
  oligonucleotide probe
tggctttaggtatctgacaatcaagatgaaaactattaccagtcaaaaagggagggtagc

SEQ ID NO: 3107 - DNA, 60 bp, Artificial Sequence
  oligonucleotide probe
gccataaggatgaagatgtgtatactctgtacactgaagcttttgtacagagaattttta

SEQ ID NO: 3108 - DNA, 60 bp, Artificial Sequence
  oligonucleotide probe
gtcctcattgtgaacataaccgtgtagttgaaacagtcagacttatttttgtaatgtatg

SEQ ID NO: 3109 - DNA, 60 bp, Artificial Sequence
  oligonucleotide probe
ctcagaattacttttctgtgggcactaaattactgtgtttattaaaccttaagaccggat

SEQ ID NO: 3110 - DNA, 60 bp, Artificial Sequence
  oligonucleotide probe
tccatccaaaaacaaggactgcatccaaattccaaataccagagactgaatcttcagcct

SEQ ID NO: 3111 - DNA, 60 bp, Artificial Sequence
  oligonucleotide probe
cagcttttgtttcaggttttactcctttaatgtcaaactctttggctttaagctcgtgcc

SEQ ID NO: 3112 - DNA, 60 bp, Artificial Sequence
  oligonucleotide probe
tcaaagcacttagtgggtctgactccagccccaaacatccctgtttctgtaacatcctgg

SEQ ID NO: 3113 - DNA, 60 bp, Artificial Sequence
  oligonucleotide probe
tgtcccgagtcctcacacccgaccccaaagctggtgctcaataaatacttctcgatgatt

SEQ ID NO: 3114 - DNA, 60 bp, Artificial Sequence
  oligonucleotide probe
ttctgcagctcatcttcctcattaatggtgaatagagcaaggggaattgtccttgcagga

SEQ ID NO: 3115 - DNA, 60 bp, Artificial Sequence
  oligonucleotide probe
acagtttcccccggctttttggaaaaatttccttggaacccagacctcccagtgaaaatt

SEQ ID NO: 3116 - DNA, 60 bp, Artificial Sequence
  oligonucleotide probe
aaggagttgcggcatctgtttacatttcccttgtcagatctagaatgtgtgtatgtgtgt

SEQ ID NO: 3117 - DNA, 60 bp, Artificial Sequence
  oligonucleotide probe
tacctctgcattttctcactttaaggaatgggtgggagtgattttgtttatgaatatgtt

SEQ ID NO: 3118 - DNA, 60 bp, Artificial Sequence
  oligonucleotide probe
aagaagaagaatgtcccttctaaggtccatcctgagagaactggctacatcaagacttgg

SEQ ID NO: 3119 - DNA, 60 bp, Artificial Sequence
  oligonucleotide probe
tgatcacatatttgaaatgaggttagcaagggcttgcgttatgtccctactcgccacatg

SEQ ID NO: 3120 - DNA, 60 bp, Artificial Sequence
  oligonucleotide probe
ggtacaaggtgtgtattttagtcagatcaaaattaagttagaatgcgttttcagggcttt

SEQ ID NO: 3121 - DNA, 60 bp, Artificial Sequence
  oligonucleotide probe
ggatgaagtctagttgataagttggagattcgcaataacctctaataaaattgaaccatc

SEQ ID NO: 3122 - DNA, 60 bp, Artificial Sequence
  oligonucleotide probe
aattttaagattccttttcctgttcatcagcagttgttattacatcccttgtggcacatt

SEQ ID NO: 3123 - DNA, 60 bp, Artificial Sequence
  oligonucleotide probe
ggactgtgtgctcttttatatgaatgtcaataaacagagactaagtaagtgtaagaagac

SEQ ID NO: 3124 - DNA, 60 bp, Artificial Sequence
  oligonucleotide probe
agttgagtggaagtgagcaatgagtattcatgcaaggacttcatgtctgtgatatgcata

SEQ ID NO: 3125 - DNA, 60 bp, Artificial Sequence
  oligonucleotide probe
aaattcccttgtaatttattactgtggtgggagggaggctgcctttgatacagagagcag

SEQ ID NO: 3126 - DNA, 60 bp, Artificial Sequence
  oligonucleotide probe
ataaatatttgagtggggacaagaggccaagcccagcaaaactatgattttctctgagta

SEQ ID NO: 3127 - DNA, 60 bp, Artificial Sequence
  oligonucleotide probe
ggaatcattcaatatgtaccatggtctccaaaatccaaggcctgaacatcattgtgaaga

SEQ ID NO: 3128 - DNA, 60 bp, Artificial Sequence
  oligonucleotide probe
ccaaccccagcaaaactatgattttctttgagtagtgacattcctggtgacattgctggt

SEQ ID NO: 3129 - DNA, 60 bp, Artificial Sequence
  oligonucleotide probe
atgattttgaggtctaagtggacctcagcaggtcactttcaacctcataggagaatctcc

SEQ ID NO: 3130 - DNA, 60 bp, Artificial Sequence
  oligonucleotide probe
agaagaagaagaatggaatctggttgctattttaaggtagaacctgagactttttgtggt

SEQ ID NO: 3131 - DNA, 60 bp, Artificial Sequence
  oligonucleotide probe
ggacttgtctgttatctctgtcactatgctttgttttcaacactgatttcatgtaatact

SEQ ID NO: 3132 - DNA, 60 bp, Artificial Sequence
  oligonucleotide probe
ccacaatccatgtgttacttttcactgtaataatcactgaaagagatataggaaatggga

SEQ ID NO: 3133 - DNA, 60 bp, Artificial Sequence
  oligonucleotide probe
tcttccccttttccttaatccttcatcatgatgaaacatgcatataatcactgggtctgg

SEQ ID NO: 3134 - DNA, 60 bp, Artificial Sequence
  oligonucleotide probe
tgtttgtctctgaaatacaactactgaacaagcttgataaataaatgcctagtcctcgag

SEQ ID NO: 3135 - DNA, 60 bp, Artificial Sequence
  oligonucleotide probe
tctttcgtcccagcaacccttgggaactggccaaaactgtttttggagccaaggaactgg

SEQ ID NO: 3136 - DNA, 60 bp, Artificial Sequence
  oligonucleotide probe
ttaactcactattttgtacttaacaaaaggctcacactcctgttaatggagaaccatcca

SEQ ID NO: 3137 - DNA, 60 bp, Artificial Sequence
  oligonucleotide probe
tctacaaggagcctgtgtcctcctcagtacctttgtggctggattgtgggctccagctct

SEQ ID NO: 3138 - DNA, 60 bp, Artificial Sequence
  oligonucleotide probe
cctgggattcattagtcaaagaagttgttattcttatgggaaactacacattcgttcaat

SEQ ID NO: 3139 - DNA, 60 bp, Artificial Sequence
  oligonucleotide probe
actgaagctaatgagagactccagctctaaacccctttcttaaggagatcggcttggaaa

SEQ ID NO: 3140 - DNA, 60 bp, Artificial Sequence
  oligonucleotide probe
gtaatttttactataacatgtgagtgtgaaaatctctatcctcaggtaaccggttgagtg

SEQ ID NO: 3141 - DNA, 60 bp, Artificial Sequence
  oligonucleotide probe
actgcttccagtgaagaattttgtatataatggcaaatttccttgagtgtggtaaccaga

SEQ ID NO: 3142 - DNA, 60 bp, Artificial Sequence
  oligonucleotide probe
taccagaactcttgcattgtataagaaattagcattatgtaaaggatgccaagttctgct

SEQ ID NO: 3143 - DNA, 60 bp, Artificial Sequence
  oligonucleotide probe
tcaagactcctgttttagtggccaggaggatttcattgggtttctttctgactgccttct

SEQ ID NO: 3144 - DNA, 60 bp, Artificial Sequence
  oligonucleotide probe
ctgtggcttgtgagggatgtgaagggttcctgaatgcctcatgaataaagagtataagcc

SEQ ID NO: 3145 - DNA, 60 bp, Artificial Sequence
  oligonucleotide probe
gtgattcactgcgttgttgagaggactgtatatttatttctagaaaacacgtggattttt

SEQ ID NO: 3146 - DNA, 60 bp, Artificial Sequence
  oligonucleotide probe
cttatctcaagcctggtgatatttctaaggcgtcatttgtattattgtttgtgtgactcc

SEQ ID NO: 3147 - DNA, 60 bp, Artificial Sequence
  oligonucleotide probe
catgctgtgatcatgaggatgattgctgctgttagacacaaaagaacggttatgcttcca

SEQ ID NO: 3148 - DNA, 60 bp, Artificial Sequence
  oligonucleotide probe
ttatagttacatatatacatactgtggtgtcctaagtgcttaggggctgtttgtaaagtg

SEQ ID NO: 3149 - DNA, 60 bp, Artificial Sequence
  oligonucleotide probe
tacttgctctctggaacttgatagaaccaacactggtttggaggatgatgcctgagattc

SEQ ID NO: 3150 - DNA, 60 bp, Artificial Sequence
  oligonucleotide probe
tggcttggataacagtacccatagtcaattttcctatctaactttataggcaatacagtg

SEQ ID NO: 3151 - DNA, 60 bp, Artificial Sequence
  oligonucleotide probe
agtcctgagatgtatgcttggcagacacaacccaagtctattaaaagtctgtgacaattc

SEQ ID NO: 3152 - DNA, 60 bp, Artificial Sequence
  oligonucleotide probe
tcatgtggccttctgctcctgatgcagctatagtgtgttgaatttaactcttagaagtga

SEQ ID NO: 3153 - DNA, 60 bp, Artificial Sequence
  oligonucleotide probe
cagtctcagcagcagacactctgtacagttttttcaatccctgtttttgaataaatattc

SEQ ID NO: 3154 - DNA, 60 bp, Artificial Sequence
  oligonucleotide probe
tacctcataacaaactgtgttgataagtactcagtagatcaagacaactggaaacgagta

SEQ ID NO: 3155 - DNA, 60 bp, Artificial Sequence
  oligonucleotide probe
tgttcccattgcactatggacagttgctttgaagagtatatatttaaatggacgagtgac

SEQ ID NO: 3156 - DNA, 60 bp, Artificial Sequence
  oligonucleotide probe
tagcctcccccaggcactgatgattaagctttccaaagtatttaaaataaagatgttttc

SEQ ID NO: 3157 - DNA, 60 bp, Artificial Sequence
  oligonucleotide probe
ggcccttcctttacactgtgaatgatacctattttgttctttctgaatttccatgtgtgc

SEQ ID NO: 3158 - DNA, 60 bp, Artificial Sequence
  oligonucleotide probe
aacacacagaggagacagtcccatcctctcccaacctgtgcaataaataatgatcatgag

SEQ ID NO: 3159 - DNA, 60 bp, Artificial Sequence
  oligonucleotide probe
gggatttttgccttaaggagtgtacaattaatccaaatttgctggtttggttttttagga

SEQ ID NO: 3160 - DNA, 60 bp, Artificial Sequence
  oligonucleotide probe
gccctgtatgcacaagccttttgtatataacggattttatattaaaacttcagacatccc

SEQ ID NO: 3161 - DNA, 60 bp, Artificial Sequence
  oligonucleotide probe
ggaagtggtttatggtatatgctgtgctttatcaaggaattatgagatattgtggagaaa

SEQ ID NO: 3162 - DNA, 60 bp, Artificial Sequence
  oligonucleotide probe
gccagtttcttttatttgtgttaacggtgactgctttctgttccaaattcagtttcataa

SEQ ID NO: 3163 - DNA, 60 bp, Artificial Sequence
  oligonucleotide probe
accccaaccccattgtttttcagcaaagtttttccagggaaacttaaaagctcatcgttc

SEQ ID NO: 3164 - DNA, 60 bp, Artificial Sequence
  oligonucleotide probe
ccacagcctcgttctgtttttgttgtttctaaactatactttccatatacaaaggtcaaa

SEQ ID NO: 3165 - DNA, 60 bp, Artificial Sequence
  oligonucleotide probe
ataatgggatgagaccaaatctctccattcctcctgggagcaatgatgggacacaatttc

SEQ ID NO: 3166 - DNA, 60 bp, Artificial Sequence
  oligonucleotide probe
tctgcttctatacagcgttaatatgtggcctaatgatttggaacctcaaatactaagctt

SEQ ID NO: 3167 - DNA, 60 bp, Artificial Sequence
  oligonucleotide probe
gctttcacgctggttaacatctagttttcctagtaaggagcgagtctgaactatagtttt

SEQ ID NO: 3168 - DNA, 60 bp, Artificial Sequence
  oligonucleotide probe
ctatgttgaaggcttgatccttagcttaaagaaggtaggaactgtggagtaggactctgt

SEQ ID NO: 3169 - DNA, 60 bp, Artificial Sequence
  oligonucleotide probe
caggggtggaagtaaggctttttgaaacagtactgtgaataaaaacaataacaaaccagc

SEQ ID NO: 3170 - DNA, 60 bp, Artificial Sequence
  oligonucleotide probe
ccacagcttctaatctcaaatttcatcaaaaaacagcttggactttgtgaccagatgtca

SEQ ID NO: 3171 - DNA, 60 bp, Artificial Sequence
  oligonucleotide probe
ctgcctactggtgatttataaaagactgctgtatataaaacattggatattgcagaccaa

SEQ ID NO: 3172 - DNA, 60 bp, Artificial Sequence
  oligonucleotide probe
atgcatatggctgcctttggacttcatgatatcccgatgaagaaagcagggaagtcttct

SEQ ID NO: 3173 - DNA, 60 bp, Artificial Sequence
  oligonucleotide probe
ttccacaaaggatgactattcaccaaagatggatcttacagaggaaactgcacaatagta

SEQ ID NO: 3174 - DNA, 60 bp, Artificial Sequence
  oligonucleotide probe
ttttaattatcagtcacattgtctttctttgtgtatcatataaatattccttttggagat

SEQ ID NO: 3175 - DNA, 60 bp, Artificial Sequence
  oligonucleotide probe
caaaccaccagggaattaagatccgtgactgagatgaatgttttaaataagaccattaaa

SEQ ID NO: 3176 - DNA, 60 bp, Artificial Sequence
  oligonucleotide probe
gcagcttctagaggattcttgtttctaggtatttattgtatcatttatgggtttacatgg

SEQ ID NO: 3177 - DNA, 60 bp, Artificial Sequence
  oligonucleotide probe
gctgtgtgtacataggactacatagtctatcctagagataaataaacaaccatatttacc

SEQ ID NO: 3178 - DNA, 60 bp, Artificial Sequence
  oligonucleotide probe
tgtataaagacgtatttttgtactacatggggactcttcctgcatgtcagcaataaaact

SEQ ID NO: 3179 - DNA, 60 bp, Artificial Sequence
  oligonucleotide probe
acagcaggctcttcaagaagttaaaactgacccatctggtatagaggtccaagtgacaac

SEQ ID NO: 3180 - DNA, 60 bp, Artificial Sequence
  oligonucleotide probe
ccaggctttgatgggacagtacaaatctatgatgtcacatcatgggatggaaagaaaacc

SEQ ID NO: 3181 - DNA, 60 bp, Artificial Sequence
  oligonucleotide probe
aatgctttcatggttttgtttcccaatgcaataaatagccaggagttctcaattattgct

SEQ ID NO: 3182 - DNA, 60 bp, Artificial Sequence
  oligonucleotide probe
agttactggaggggaggattttgtgattaaattgctttagaaggcgattatcttggttgt

SEQ ID NO: 3183 - DNA, 60 bp, Artificial Sequence
  oligonucleotide probe
taacagaaacaatgagcaccaaactggacttgtggagaaatgcacactatctcatgaatt

SEQ ID NO: 3184 - DNA, 60 bp, Artificial Sequence
  oligonucleotide probe
aggcttcgaagcagcctgttttccctcaaatggggttgtgtgtatcaaaacgaggttcgg

SEQ ID NO: 3185 - DNA, 60 bp, Artificial Sequence
  oligonucleotide probe
ctgctgatatctgtcggatgggtatcacagcgtaatttcatcatagggcttttctttata

SEQ ID NO: 3186 - DNA, 60 bp, Artificial Sequence
  oligonucleotide probe
cactgcatcctttatggtcatggttttgagaaaagcaaatatcatttttggctgcattaa

SEQ ID NO: 3187 - DNA, 60 bp, Artificial Sequence
  oligonucleotide probe
acaacctgagagacagatcagccttattaattcagctttttaccacaatggaaatctgaa

SEQ ID NO: 3188 - DNA, 60 bp, Artificial Sequence
  oligonucleotide probe
tataagagtgacctgaccaaggacattacgacgtcagtactgacagtcaacaacaaagcc

SEQ ID NO: 3189 - DNA, 60 bp, Artificial Sequence
  oligonucleotide probe
ccactacacaggtttggcatcttttgtgttttatctctttaagtgcatgtgaaatttgta

SEQ ID NO: 3190 - DNA, 60 bp, Artificial Sequence
  oligonucleotide probe
ccctacacacagataatatggatatttcacactccacaagagacctggctttggagaaaa

SEQ ID NO: 3191 - DNA, 60 bp, Artificial Sequence
  oligonucleotide probe
gtgtagatccttgatttccataaacctgtaaaagcaatacttagaggctgacttatttca

SEQ ID NO: 3192 - DNA, 60 bp, Artificial Sequence
  oligonucleotide probe
tatagtgtgcccggaatgtagaggtaagtgggccaaagtgtacatcaagaccaacaacat

SEQ ID NO: 3193 - DNA, 60 bp, Artificial Sequence
  oligonucleotide probe
gatctctcaattctgtttgcaaagcagtgcagaaaactataatcaaatgtgacatgtcta

SEQ ID NO: 3194 - DNA, 60 bp, Artificial Sequence
  oligonucleotide probe
ctgcaccactggtcagagcctcgtatgaagtgtttatatttagaaatgtttatatttaag

SEQ ID NO: 3195 - DNA, 60 bp, Artificial Sequence
  oligonucleotide probe
aatttgagtaagcactgaccacttctgcaggttacagagccctagtccaggattaacctt

SEQ ID NO: 3196 - DNA, 60 bp, Artificial Sequence
  oligonucleotide probe
gaagaaaacggtactagagttggacagaatggagatgtctatggatatgttccagaaaaa

SEQ ID NO: 3197 - DNA, 60 bp, Artificial Sequence
  oligonucleotide probe
gagagctattgtattgataatgaagcactttatgacatctgcttcagaaccctaaagctg

SEQ ID NO: 3198 - DNA, 60 bp, Artificial Sequence
  oligonucleotide probe
caccaacatctaacgctttacataaatgcccttttagcttctctatttcgacacaactgt

SEQ ID NO: 3199 - DNA, 60 bp, Artificial Sequence
  oligonucleotide probe
aagaggatgtttcactcaatcatgcatgagaattgcactgtacccaaccaagacccatcc

SEQ ID NO: 3200 - DNA, 60 bp, Artificial Sequence
  oligonucleotide probe
aatatggcatctacacaaaggtcacgaccttcctcaagtggattgacaggtccatgaaag

SEQ ID NO: 3201 - DNA, 60 bp, Artificial Sequence
  oligonucleotide probe
aattctgtaccagtgtaacaaaatatgaccttgattttacatcaatatataaagatttta

SEQ ID NO: 3202 - DNA, 60 bp, Artificial Sequence
  oligonucleotide probe
ctgtcaggaaggtgtctaaacacactacagtatgttcttacgaaatatgcttttattaag

SEQ ID NO: 3203 - DNA, 60 bp, Artificial Sequence
  oligonucleotide probe
gagtgtgactctttaatagtctctcgtctcttctgaagctgtggtaaataaatcaaataa

SEQ ID NO: 3204 - DNA, 60 bp, Artificial Sequence
  oligonucleotide probe
cctgtataaagcattttgcactatttaaagaaacccttgtggatgaagtcaggttgtgca

SEQ ID NO: 3205 - DNA, 60 bp, Artificial Sequence
  oligonucleotide probe
gtgccaaagcatttcttgtcttggaacattttgatacctttatgaagctcaaagaacaat

SEQ ID NO: 3206 - DNA, 60 bp, Artificial Sequence
  oligonucleotide probe
gacacagcaaagggacatttattttatcagtcatttgagaaaaataggtgttacagctag

SEQ ID NO: 3207 - DNA, 60 bp, Artificial Sequence
  oligonucleotide probe
gttctaagtagtcgcgtcatcaaaaataggcagttgatgtccttctgtgtgacacatgga

SEQ ID NO: 3208 - DNA, 60 bp, Artificial Sequence
  oligonucleotide probe
agttaaaatccgcttatcagtgattgcatgatgccttacggtttccaagactactttctc

SEQ ID NO: 3209 - DNA, 60 bp, Artificial Sequence
  oligonucleotide probe
ggatacctgctctagtcacctgaataacagcatatacaaaaagctattagcttagggaaa

SEQ ID NO: 3210 - DNA, 60 bp, Artificial Sequence
  oligonucleotide probe
ggaagggtaaatgtggaagagaaaaccaagaccccaacatttttgctttcttcaaactca

SEQ ID NO: 3211 - DNA, 60 bp, Artificial Sequence
  oligonucleotide probe
gcctaggtggaaattttgacatcttatggattccgaccagtaaaaacctttaaatccggc

SEQ ID NO: 3212 - DNA, 60 bp, Artificial Sequence
  oligonucleotide probe
ctgatgacctgctacagaccatgttttctaagaaccattttgttccctgatataaaaaca

SEQ ID NO: 3213 - DNA, 60 bp, Artificial Sequence
  oligonucleotide probe
aagggaggttgaatatctagcttttcaagcctttttgtgtcttgacatcaactgttgacc

SEQ ID NO: 3214 - DNA, 60 bp, Artificial Sequence
  oligonucleotide probe
cgctggtcctgttcccctgagaattaggatatatatgcattgttttcttcttttaataaa

SEQ ID NO: 3215 - DNA, 60 bp, Artificial Sequence
  oligonucleotide probe
agtgtcatcatcattgttcttaacgctcaaaaccttcacacttaatagaggattccgact

SEQ ID NO: 3216 - DNA, 60 bp, Artificial Sequence
  oligonucleotide probe
gagatggttgcattcgaactgttgtaagaattgtaagaatcttgacttttttacgtttgg

SEQ ID NO: 3217 - DNA, 60 bp, Artificial Sequence
  oligonucleotide probe
cgacaataatctgtattttaaaccaacagctgcagtgtattgggtggtatgttttagaaa

SEQ ID NO: 3218 - DNA, 60 bp, Artificial Sequence
  oligonucleotide probe
catcatgtcaccaaagtctttgatgagaaacgggaacctgctttgtgattaagtaaaaaa

SEQ ID NO: 3219 - DNA, 60 bp, Artificial Sequence
  oligonucleotide probe
tggtacccttttctcttcattcttgttgggaggtttaatctgtatctagaacccatagta

SEQ ID NO: 3220 - DNA, 60 bp, Artificial Sequence
  oligonucleotide probe
gtcccattctctctcgctttgaaagtacacatccaagagaagattatctttttaagtcat

SEQ ID NO: 3221 - DNA, 60 bp, Artificial Sequence
  oligonucleotide probe
agtaactcagcacaagtgttacattgtggccacagttgaccgtgacctcaaacgaagaat

SEQ ID NO: 3222 - DNA, 60 bp, Artificial Sequence
  oligonucleotide probe
caactgttttttcttattgaaaagtaaatatcaaaagcagccattgtacctcctctccct

SEQ ID NO: 3223 - DNA, 60 bp, Artificial Sequence
  oligonucleotide probe
atgagcaaggaatataagtatctgaagagtatgttccatgtgtttcaggatagcatttac

SEQ ID NO: 3224 - DNA, 60 bp, Artificial Sequence
  oligonucleotide probe
gctgagcaagacagatcgcttgcatatttttaaaaatttctactacagagacattccaat

SEQ ID NO: 3225 - DNA, 60 bp, Artificial Sequence
  oligonucleotide probe
ggattccttgctatccgtttgcattttctagtataattcatagcaagttgacctcggagt

SEQ ID NO: 3226 - DNA, 60 bp, Artificial Sequence
  oligonucleotide probe
acataaaagattgtaaaagatctgataaatgtcaataataataaagtgaattatagaatg

SEQ ID NO: 3227 - DNA, 60 bp, Artificial Sequence
  oligonucleotide probe
ccctgcagtgatcttctttaactcatttactgtacatccatatgcaaaaataaaatgcca

SEQ ID NO: 3228 - DNA, 60 bp, Artificial Sequence
  oligonucleotide probe
gaaatgtgccctgtgtagaagaatgtacagtgtattttacagatttgaagtaacgttctt

SEQ ID NO: 3229 - DNA, 60 bp, Artificial Sequence
  oligonucleotide probe
gatttcagactctgggcttggaaaccagttgactgcctttcttagcgaggtgccctcgga

SEQ ID NO: 3230 - DNA, 60 bp, Artificial Sequence
  oligonucleotide probe
tcctagagccagagttggtatgtgctgagaacacaaacttgtcagctaattggtcagatg

SEQ ID NO: 3231 - DNA, 60 bp, Artificial Sequence
  oligonucleotide probe
cactccaggccaatcagattggatgccctggacccaggtgatggtgtgcacatattccct

SEQ ID NO: 3232 - DNA, 60 bp, Artificial Sequence
  oligonucleotide probe
ttctaaattcaactattcgtcacttcaatcaggttctgacttacgacgtcactgtttaat

SEQ ID NO: 3233 - DNA, 60 bp, Artificial Sequence
  oligonucleotide probe
aactctgaatccagataaggaactgagccatccacacgatgaaggagggcttctaaaaaa

SEQ ID NO: 3234 - DNA, 60 bp, Artificial Sequence
  oligonucleotide probe
ggctagcagttcagtggaacaaacatttggttttgtcccaatgtttactgtgcttaattt

SEQ ID NO: 3235 - DNA, 60 bp, Artificial Sequence
  oligonucleotide probe
ctgaagcatagtacagcatgtgaattattcaagtttctgtcacagcatgttacagaaata

SEQ ID NO: 3236 - DNA, 60 bp, Artificial Sequence
  oligonucleotide probe
ctggtttcttgtttgttttttgtttattttttcagctagtgggagacagattcggaatga

SEQ ID NO: 3237 - DNA, 60 bp, Artificial Sequence
  oligonucleotide probe
ttagaaccgttaggaattgtcaaggaaaactcaaagtgctgactagtcagcactgcaggg

SEQ ID NO: 3238 - DNA, 60 bp, Artificial Sequence
  oligonucleotide probe
gggggaagaagtggaaactatgtccagtgaacttttccagtaaatgaagcaagcactaaa

SEQ ID NO: 3239 - DNA, 60 bp, Artificial Sequence
  oligonucleotide probe
acttgtgcttcctgtgagcaccctgtcttggtttcaattaaatgagaaacatggtctcca

SEQ ID NO: 3240 - DNA, 60 bp, Artificial Sequence
  oligonucleotide probe
ggccaaagattgtgtctctgactctgtgattactaacatcacattacaactcataaaggc

SEQ ID NO: 3241 - DNA, 60 bp, Artificial Sequence
  oligonucleotide probe
cggcttttgtagatacagaaagcatcagagactctatatatttaagccaaaagctatgtt

SEQ ID NO: 3242 - DNA, 60 bp, Artificial Sequence
  oligonucleotide probe
gctctcctcacctttagtgtgggtttatttaaaataaagtttgatgctcctaataaaagc

SEQ ID NO: 3243 - DNA, 60 bp, Artificial Sequence
  oligonucleotide probe
ccagctttaggagttttaaagacagtacgatcatagagcaaggttgcacctctgtatgtt

SEQ ID NO: 3244 - DNA, 60 bp, Artificial Sequence
  oligonucleotide probe
ttgtggttagcatgctaatcagtgtgacagatactgctgggaaataatgttggttgattg

SEQ ID NO: 3245 - DNA, 60 bp, Artificial Sequence
  oligonucleotide probe
gctgtgttcatggcagagactaaaggagtggctctcaacctgctgtcgctacaggagctg

SEQ ID NO: 3246 - DNA, 60 bp, Artificial Sequence
  oligonucleotide probe
gacgaggtcaacatcgatgagctattgaattggacagtgaagaggaaagatgccggaaaa

SEQ ID NO: 3247 - DNA, 60 bp, Artificial Sequence
  oligonucleotide probe
aacgccatcttttgtgtctaatagtgaagtcatgtccatacagttcgtcagcaatgtgtg

SEQ ID NO: 3248 - DNA, 60 bp, Artificial Sequence
  oligonucleotide probe
ttccctggggtagaccaagagagtcagaagaaagagtgtctcccagggaatgaggaagga

SEQ ID NO: 3249 - DNA, 60 bp, Artificial Sequence
  oligonucleotide probe
caagtctaggactttttaaaatggtggaggcaagtaaagagttttatcatccagtttctt

SEQ ID NO: 3250 - DNA, 60 bp, Artificial Sequence
  oligonucleotide probe
ctgggatgaaacctcatttagatgtcttgaattaatacattgtgtgtaaacctggtatag

SEQ ID NO: 3251 - DNA, 60 bp, Artificial Sequence
  oligonucleotide probe
cctcactgtgtctactaacgaccagcacttgctaatgtaaataatagtaaattattgaga

SEQ ID NO: 3252 - DNA, 60 bp, Artificial Sequence
  oligonucleotide probe
ctgtttgaaacagttcaagttcttagaaaattggggccgctaataatgtctgaaacttaa

SEQ ID NO: 3253 - DNA, 60 bp, Artificial Sequence
  oligonucleotide probe
ccttttcctttcttcggcttggcaatgctcctttaagaattggttgtttacattcttcca

SEQ ID NO: 3254 - DNA, 60 bp, Artificial Sequence
  oligonucleotide probe
atgtagacaggctaataaagtgtgtccttttgatgcttcttggcttcaacctgttgactt

SEQ ID NO: 3255 - DNA, 60 bp, Artificial Sequence
  oligonucleotide probe
gggaactttcctccattaatgtacaatcttgaactaactgctaataaaatgggattctgt

SEQ ID NO: 3256 - DNA, 60 bp, Artificial Sequence
  oligonucleotide probe
tgttttagctgttacacatacagtaatacctgaatatccaacggtatagatcacaagggg

SEQ ID NO: 3257 - DNA, 60 bp, Artificial Sequence
  oligonucleotide probe
tcaggccaaagagtcaagccaatgtcatttgtaaggcacaatcattttaagttcagaccc

SEQ ID NO: 3258 - DNA, 60 bp, Artificial Sequence
  oligonucleotide probe
agggagtttgacattttcgatttttaggttctggtgactgagataaatgaatgacctccc

SEQ ID NO: 3259 - DNA, 60 bp, Artificial Sequence
  oligonucleotide probe
tggatcatcaatcgttgtggcacagaagttagatatgtgattgattactatgatggtggt

SEQ ID NO: 3260 - DNA, 60 bp, Artificial Sequence
  oligonucleotide probe
caggtttaacagtttcaaggtctttaacccggtcaaatgggcaaaaaatgtttgtcccca

SEQ ID NO: 3261 - DNA, 60 bp, Artificial Sequence
  oligonucleotide probe
cctagagcttcgttaacctggagaatgtatttagtagtagagtattttgttggtactcat

SEQ ID NO: 3262 - DNA, 60 bp, Artificial Sequence
  oligonucleotide probe
cctttagagtaaatgagtgtaagctacaagtggacgttttctttatttctttgcagtaag

SEQ ID NO: 3263 - DNA, 60 bp, Artificial Sequence
  oligonucleotide probe
gggctcacttgtctctcaagctctgaatttctcctttgtgcatacttcaagtaattttct

SEQ ID NO: 3264 - DNA, 60 bp, Artificial Sequence
  oligonucleotide probe
gtgtctgttttcatacctggaagtctcaatgtggaaatccttaatatactttgtatgttc

SEQ ID NO: 3265 - DNA, 60 bp, Artificial Sequence
  oligonucleotide probe
cagaggatttttcaaagttacccaaagaagagggagatttatactatgttgtcaataggt

SEQ ID NO: 3266 - DNA, 60 bp, Artificial Sequence
  oligonucleotide probe
ttcaggtgtttggttttgtatgtgctccctcattttaaacattaaaccaaacttctggtt

SEQ ID NO: 3267 - DNA, 60 bp, Artificial Sequence
  oligonucleotide probe
ctcctcccaggcactcatttatattgctctgaaagagctttccaaagtatttaaaaataa

SEQ ID NO: 3268 - DNA, 60 bp, Artificial Sequence
  oligonucleotide probe
ccaaaaatcaattaataaatgaaaaaatttgaaagttgtaatactgacttttgctataaa

SEQ ID NO: 3269 - DNA, 60 bp, Artificial Sequence
  oligonucleotide probe
aggactgctgggctctccgttcaattgttctctctttattaaatatcaactcttcctccc

SEQ ID NO: 3270 - DNA, 60 bp, Artificial Sequence
  oligonucleotide probe
atatgctcatctggtacagaccataatcgagaacccattcttgaatggagaggtcatccg

SEQ ID NO: 3271 - DNA, 60 bp, Artificial Sequence
  oligonucleotide probe
cctgcttacataaatgtcctctgatctaagactctattaagatagttacaagcataaagc

SEQ ID NO: 3272 - DNA, 60 bp, Artificial Sequence
  oligonucleotide probe
gggaatagtatactaagtaaatagcaataccaatagtatcgagacttgttattgtcgtgg

SEQ ID NO: 3273 - DNA, 60 bp, Artificial Sequence
  oligonucleotide probe
gctacagacaattttgagatcattgagtgtgaacatatgtacatctttctacatatccac

SEQ ID NO: 3274 - DNA, 60 bp, Artificial Sequence
  oligonucleotide probe
aggtgttggcgaaccttttcatttcctctctccagatttcagtgaagtaaacagtgtttg

SEQ ID NO: 3275 - DNA, 60 bp, Artificial Sequence
  oligonucleotide probe
ggcaattctgctttataaaatcgtgtctctaaaactgtgttcatgtgtctaggaagtatt

SEQ ID NO: 3276 - DNA, 60 bp, Artificial Sequence
  oligonucleotide probe
aagctgtcctttttataatcatctttccttcaatacaataaacattcttgttttataagt

SEQ ID NO: 3277 - DNA, 60 bp, Artificial Sequence
  oligonucleotide probe
attgtaaaggaacaactgaagaactggttgctggggatgtcttcagtagtcaggagtacc

SEQ ID NO: 3278 - DNA, 60 bp, Artificial Sequence
  oligonucleotide probe
cctccttcagagtctgagatgctgggacagaaagtagaatttaatatatttttggattaa

SEQ ID NO: 3279 - DNA, 60 bp, Artificial Sequence
  oligonucleotide probe
ccatgtagtcattttcaagagaaaggtattcaagagaaaggtgtgaatgtgtttgggcca

SEQ ID NO: 3280 - DNA, 60 bp, Artificial Sequence
  oligonucleotide probe
ggaattcaacttctccagaagtgacctccttttccttatttatatttcctggccactatt

SEQ ID NO: 3281 - DNA, 60 bp, Artificial Sequence
  oligonucleotide probe
ttttttctgagaaactgcctcttttcctgttctggacaagagttgagcagcttgtccgac

SEQ ID NO: 3282 - DNA, 60 bp, Artificial Sequence
  oligonucleotide probe
ttttaaaaaccttctgctttctgaaactcctttgtcagcagatagcgtctggggaggtgg

SEQ ID NO: 3283 - DNA, 60 bp, Artificial Sequence
  oligonucleotide probe
tctctgaaagcttgctggacctgctggttaaccttctgaagttttgggtttgctgagaaa

SEQ ID NO: 3284 - DNA, 60 bp, Artificial Sequence
  oligonucleotide probe
cttctattttactgcttgtctatccttaaattgggcttattttgatttcataataaatta

SEQ ID NO: 3285 - DNA, 60 bp, Artificial Sequence
  oligonucleotide probe
gcaactgacagagaagcattttgctagtctgacaaccgtgtgactaaaggacatgttact

SEQ ID NO: 3286 - DNA, 60 bp, Artificial Sequence
  oligonucleotide probe
ctgacattaatccacaattaccagacaaggactagatcacaagttcagtcattcatattt

SEQ ID NO: 3287 - DNA, 60 bp, Artificial Sequence
  oligonucleotide probe
ggtaacaattcctaagttttgccaagaaaatagagcatgttctaaagccccttttgattt

SEQ ID NO: 3288 - DNA, 60 bp, Artificial Sequence
  oligonucleotide probe
gaaaatgacaaagaaaggacagattttcgggaagagaatcacaggtgtacttatcaacag

SEQ ID NO: 3289 - DNA, 60 bp, Artificial Sequence
  oligonucleotide probe
tcttaggtgtcgtctaagagttatttctcgttctcaatgtgacctgagtgaagaacttaa

SEQ ID NO: 3290 - DNA, 60 bp, Artificial Sequence
  oligonucleotide probe
cttcccttacagctgtgttcccttggaaagcaacctagttttgcagttttggattccaag

SEQ ID NO: 3291 - DNA, 60 bp, Artificial Sequence
  oligonucleotide probe
ggaattggaaatcgccttttgcatattctttcaccgttttgactttttgagacctattat

SEQ ID NO: 3292 - DNA, 60 bp, Artificial Sequence
  oligonucleotide probe
tgcctcctttctgcacatgaatactggactgttccttgaaagcacatcatgtttaataaa

SEQ ID NO: 3293 - DNA, 60 bp, Artificial Sequence
  oligonucleotide probe
aattcactgcagcactaagggtgaaagccaaagggtttagaaagatgaatgaagccgggt

SEQ ID NO: 3294 - DNA, 60 bp, Artificial Sequence
  oligonucleotide probe
ggctttcttcaccttgtacagtagactgaaaaatcatgtcctataattttagggcttttt

SEQ ID NO: 3295 - DNA, 60 bp, Artificial Sequence
  oligonucleotide probe
ggtccagctaaaataaacagcaaatacaataacacagctaaccaaatacttagagatgca

SEQ ID NO: 3296 - DNA, 60 bp, Artificial Sequence
  oligonucleotide probe
ccttatgatcttactcgataggacatcattcttacgaacgttgtgttatctgttgtttta

SEQ ID NO: 3297 - DNA, 60 bp, Artificial Sequence
  oligonucleotide probe
tgctgtgtctgaatctttaatggccttaattcatacctttctgtccaattacagctgtaa

SEQ ID NO: 3298 - DNA, 60 bp, Artificial Sequence
  oligonucleotide probe
cctacccattaactacaatccatcacttagaaagttctagatagagggtagtattttctt

SEQ ID NO: 3299 - DNA, 60 bp, Artificial Sequence
  oligonucleotide probe
gctgtagttgcttttttccagtagtagttccttttgttaaacctctagcaatcaataaag

SEQ ID NO: 3300 - DNA, 60 bp, Artificial Sequence
  oligonucleotide probe
ctccaggtgtgaccagctcttggaagctaataggtttactttggtggtgtttttaaaaaa

SEQ ID NO: 3301 - DNA, 60 bp, Artificial Sequence
  oligonucleotide probe
aggggaacctatgtgtgaaggatatccccctatacaggaggttcaagttctttcttcaaa

SEQ ID NO: 3302 - DNA, 60 bp, Artificial Sequence
  oligonucleotide probe
aaagcagaaagccatgttactatcctgtgtaaggatgttcaggcatctgatctggaggac

SEQ ID NO: 3303 - DNA, 60 bp, Artificial Sequence
  oligonucleotide probe
tttaaccgcctcttgatcacagtgctaaatagtgtattcaccttctcctacaagaaggct

SEQ ID NO: 3304 - DNA, 60 bp, Artificial Sequence
  oligonucleotide probe
attccattttacactctgtccaacttgtctttgggtcaccagaagccttgcaagtcactg

SEQ ID NO: 3305 - DNA, 60 bp, Artificial Sequence
  oligonucleotide probe
cgcatttcgtgtctgagaaaattcccatacctttatgaagctcaaagaaaagaacaataa

SEQ ID NO: 3306 - DNA, 60 bp, Artificial Sequence
  oligonucleotide probe
cttttacaggctttgtcctgatcgtagcatagagagaatagctggatatttaacttgtat

SEQ ID NO: 3307 - DNA, 60 bp, Artificial Sequence
  oligonucleotide probe
ggctagactttgaatcgggaaacaataggaattcattttcaagtgcttttagctatgatt

SEQ ID NO: 3308 - DNA, 60 bp, Artificial Sequence
  oligonucleotide probe
cctccttttgcctgagctgggaagtttttatttattgccttaatactttatttggctgtt

SEQ ID NO: 3309 - DNA, 60 bp, Artificial Sequence
  oligonucleotide probe
aaagtgaaggttctgtggtcttccctctatagacgcagagatttgctcccttgggaaaaa

SEQ ID NO: 3310 - DNA, 60 bp, Artificial Sequence
  oligonucleotide probe
gaacctcctgtgacttctgtctgttctgtattgaggctcagggagaaactagcatttttt

SEQ ID NO: 3311 - DNA, 60 bp, Artificial Sequence
  oligonucleotide probe
aggactgctgggctttcggttcaattgttttttctttattaaatatcaactcttcctgcc

SEQ ID NO: 3312 - DNA, 60 bp, Artificial Sequence
  oligonucleotide probe
gcacactcgctgataataatgctgattgtgacgcctattatacattacttgtgctgatgg

SEQ ID NO: 3313 - DNA, 60 bp, Artificial Sequence
  oligonucleotide probe
gagcattggaacgagatggagggccaagtaaaggtcgcatgtgttttattcagaagaaat

SEQ ID NO: 3314 - DNA, 60 bp, Artificial Sequence
  oligonucleotide probe
gggctattaagtatttatctcaacatttccgttctctcatggaccagatcctgtagtttt

SEQ ID NO: 3315 - DNA, 60 bp, Artificial Sequence
  oligonucleotide probe
tgacaaagcaataccacatcacagctcgaattccaggtctcttcattcctcagagaacag

SEQ ID NO: 3316 - DNA, 60 bp, Artificial Sequence
  oligonucleotide probe
ggaagagtctattttagtcatacgattttggtcatgagtaaggactatatttatgtcacc

SEQ ID NO: 3317 - DNA, 60 bp, Artificial Sequence
  oligonucleotide probe
atctctgtctgcggttaatagaatcagtgttttctcgttaggactctagggtcagggaga

SEQ ID NO: 3318 - DNA, 60 bp, Artificial Sequence
  oligonucleotide probe
ccagcacaaaagcagatggacttaaaacttccacaggtcacaaatataaatatctatatc

SEQ ID NO: 3319 - DNA, 60 bp, Artificial Sequence
  oligonucleotide probe
ctcatttctaattatgtagttctttatcagggagtgttcctatccaatcaatcttgcatg

SEQ ID NO: 3320 - DNA, 60 bp, Artificial Sequence
  oligonucleotide probe
gaaaagcaactcagactactgaatcagatacagaaggcaaataaaaatcaatgtgttacc

SEQ ID NO: 3321 - DNA, 60 bp, Artificial Sequence
  oligonucleotide probe
gccacacctgaagtgccaacatttggacttttgcacctgttgttcccttggcttggctgt

SEQ ID NO: 3322 - DNA, 60 bp, Artificial Sequence
  oligonucleotide probe
tttcctggatgggaatgttcaaggatacagtatatcatggcaggaaattcgcagcgacag

SEQ ID NO: 3323 - DNA, 60 bp, Artificial Sequence
  oligonucleotide probe
caacaagtacaatgtttcttttgactactactattttcttctcataaccatggcctccta

SEQ ID NO: 3324 - DNA, 60 bp, Artificial Sequence
  oligonucleotide probe
cttttgggactgctgactaccaatacttgaattccagttgttatcaatattcctattttg

SEQ ID NO: 3325 - DNA, 60 bp, Artificial Sequence
  oligonucleotide probe
caaccctgcattgaaccaaaaggtagagtagactactgacaataatgacaaaataaagta

SEQ ID NO: 3326 - DNA, 60 bp, Artificial Sequence
  oligonucleotide probe
tttgcaagaagttcatggaacgtgaccctgatgagttaagatttaatgcaattgctctct

SEQ ID NO: 3327 - DNA, 60 bp, Artificial Sequence
  oligonucleotide probe
tgttccgtctttcctggatcactacagtgaagtattacagttgtacagtttcccaatctg

SEQ ID NO: 3328 - DNA, 60 bp, Artificial Sequence
  oligonucleotide probe
caactcctagaaaaagatgacctttgcttgtgcatatttataatagcgttcgttatcaca

SEQ ID NO: 3329 - DNA, 60 bp, Artificial Sequence
  oligonucleotide probe
gaaaagtagcccccaacctctttgctgcattatccatagataatgatagctagatgaagt

SEQ ID NO: 3330 - DNA, 60 bp, Artificial Sequence
  oligonucleotide probe
aacacacaagtccagactgtacaccagaagatggtgtggtgtttcttaaggctggaagaa

SEQ ID NO: 3331 - DNA, 60 bp, Artificial Sequence
  oligonucleotide probe
tgatgagttatagccaagaagccttaggagtctccataaggcatattcaaaaccactgac

SEQ ID NO: 3332 - DNA, 60 bp, Artificial Sequence
  oligonucleotide probe
gtctcgtgtcatacctttttaccagatttcaggagcaagtgtataagcaatgaaataaaa

SEQ ID NO: 3333 - DNA, 60 bp, Artificial Sequence
  oligonucleotide probe
tgtgaagaattatttatttttgccaaagcagatctaataaaagccacagctcagcttctg

SEQ ID NO: 3334 - DNA, 60 bp, Artificial Sequence
  oligonucleotide probe
tccctggtgtccaagtttccttgcagagtgtgtgaagaattatttatttttgccaaagca

SEQ ID NO: 3335 - DNA, 60 bp, Artificial Sequence
  oligonucleotide probe
ctccagaaaagacatcctaatttatcttgacatgttttcagttaccttctaggtgaagcc

SEQ ID NO: 3336 - DNA, 60 bp, Artificial Sequence
  oligonucleotide probe
ttgacttgtttggcatagattatcagtacattatgttctccatcaagtcagtttgtgcaa

SEQ ID NO: 3337 - DNA, 60 bp, Artificial Sequence
  oligonucleotide probe
tcactacacctaagtgcacaagtgataagaagttggacagatagacagatagcagcagtc

SEQ ID NO: 3338 - DNA, 60 bp, Artificial Sequence
  oligonucleotide probe
cattggttacccaatgcattctcttgtgaaggtgtagaaataaagtgagtttagttttca

SEQ ID NO: 3339 - DNA, 60 bp, Artificial Sequence
  oligonucleotide probe
ggttggggaaaggtacaaatacattgtaagaatatcatttcagatgacttcatctgaaca

SEQ ID NO: 3340 - DNA, 60 bp, Artificial Sequence
  oligonucleotide probe
atgttgtagatgctttgcaaagccctctggtagacaagaagagcttcattcccgtggaaa

SEQ ID NO: 3341 - DNA, 60 bp, Artificial Sequence
  oligonucleotide probe
gcacgttctatggaaactggagctatccaagaaaagtgccaggaataaaaaggaaccatg

SEQ ID NO: 3342 - DNA, 60 bp, Artificial Sequence
  oligonucleotide probe
tgcctgtatctatttccctcttctactgactgtgtctattccttactcacaaacaagcag

SEQ ID NO: 3343 - DNA, 60 bp, Artificial Sequence
  oligonucleotide probe
cctttatttccagcctcctcttacaaggggagacgcagaagtaaagaaattttatgtgtg

SEQ ID NO: 3344 - DNA, 60 bp, Artificial Sequence
  oligonucleotide probe
tgatcaaccctcttttaaaaacatttaaacagctcttgactctcttgtgtggcctgaatg

SEQ ID NO: 3345 - DNA, 60 bp, Artificial Sequence
  oligonucleotide probe
cggtgtgagaactgagctgctgttatcaccatattttactttcctattatattcagaaaa

SEQ ID NO: 3346 - DNA, 60 bp, Artificial Sequence
  oligonucleotide probe
ttaccttctaggggtatggggaagacacagatgacatgctccaaacgtcaaaatcatgac

SEQ ID NO: 3347 - DNA, 60 bp, Artificial Sequence
  oligonucleotide probe
cgttcctgctgtaaatacttgaaatcacgacactcaatgtgaacttttaaaagaatgact

SEQ ID NO: 3348 - DNA, 60 bp, Artificial Sequence
  oligonucleotide probe
ttattcagggttcatttccacccatttcggttttcctttacttgcgttcctggaagcctt

SEQ ID NO: 3349 - DNA, 60 bp, Artificial Sequence
  oligonucleotide probe
agaacagagagaaaaggataaatagacagaatcacggattttataactccttagaggcgc

SEQ ID NO: 3350 - DNA, 60 bp, Artificial Sequence
  oligonucleotide probe
cgatgagaacctgagtgtgagagtgaaactacggagtatcatttgtagctttgttcctca

SEQ ID NO: 3351 - DNA, 60 bp, Artificial Sequence
  oligonucleotide probe
gcctacagtatggtggttagcttgatgcatatctaacttaataaataatgcagaaccatt

SEQ ID NO: 3352 - DNA, 60 bp, Artificial Sequence
  oligonucleotide probe
tcccaagtctgtattaaatccttaatgatattacgtcaatggtggacctcatttgttttc

SEQ ID NO: 3353 - DNA, 60 bp, Artificial Sequence
  oligonucleotide probe
atcttagcttctacccccaaaactttttctcgttctggaccaagataaagtaaaacttcc

SEQ ID NO: 3354 - DNA, 60 bp, Artificial Sequence
  oligonucleotide probe
ggtacacatttatgcctccataaagccttactaattacaaatgtaaacatgtaactgctc

SEQ ID NO: 3355 - DNA, 60 bp, Artificial Sequence
  oligonucleotide probe
gtttcaggcatttctagttcttcccatacttgactgatgttttaagagcctgttaaggct

SEQ ID NO: 3356 - DNA, 60 bp, Artificial Sequence
  oligonucleotide probe
ctgctctttgtccttgtattcttttatatgaatccctggaaaaataaaaatccaggaacc

SEQ ID NO: 3357 - DNA, 60 bp, Artificial Sequence
  oligonucleotide probe
ggcagatgatgtggaccgaagggtccaatttggcatcgaaagtggaaagcttcgtggctt

SEQ ID NO: 3358 - DNA, 60 bp, Artificial Sequence
  oligonucleotide probe
ctcagagctctttccattaatttctttccccattcaaaacatgtatacccttcagaaaat

SEQ ID NO: 3359 - DNA, 60 bp, Artificial Sequence
  oligonucleotide probe
ctctctcttagctcaaccagttgtccgtgtgaagattaggttgctggttttggctttttt

SEQ ID NO: 3360 - DNA, 60 bp, Artificial Sequence
  oligonucleotide probe
caaagacagattgctctgtgtttaacaaagcgtcctaaagcatggacttaaagttatttt

SEQ ID NO: 3361 - DNA, 60 bp, Artificial Sequence
  oligonucleotide probe
gggcatctgggttgggaattttattttgtaagcatttcctacataatatgagtttctacc

SEQ ID NO: 3362 - DNA, 60 bp, Artificial Sequence
  oligonucleotide probe
gcgttctcccatctgtttgcatagatatttaactttacaaaaaggacagtgaattcctag

SEQ ID NO: 3363 - DNA, 60 bp, Artificial Sequence
  oligonucleotide probe
tactgactcttccactgtaaccaattgaatggccttgatgtacgtaagaacacccagaaa

SEQ ID NO: 3364 - DNA, 60 bp, Artificial Sequence
  oligonucleotide probe
gtcagaggtaacactagctagttcttgtctttccataactcctaaatttcaaatgactaa

SEQ ID NO: 3365 - DNA, 60 bp, Artificial Sequence
  oligonucleotide probe
ccattgtgtttaagctgtattgaattatctgtggaatgcattgtgaactgtaaagcaaag

SEQ ID NO: 3366 - DNA, 60 bp, Artificial Sequence
  oligonucleotide probe
gtggaaaaatctgtctttatggtatgttctaggtgtattgtgatttactgttagattgcc

SEQ ID NO: 3367 - DNA, 60 bp, Artificial Sequence
  oligonucleotide probe
atttgtaggagcgctaccacctgttttcaagagaacatagaactccaacgtaaccgtcat

SEQ ID NO: 3368 - DNA, 60 bp, Artificial Sequence
  oligonucleotide probe
gggcttacttgggtaacattctcaaaataaggtatagtctgtctcaaaggaatgtttgcc

SEQ ID NO: 3369 - DNA, 60 bp, Artificial Sequence
  oligonucleotide probe
gtctgagaaaatgtacatttaccagaacactaattttcatggtgctaatatcccatcaac

SEQ ID NO: 3370 - DNA, 60 bp, Artificial Sequence
  oligonucleotide probe
gtaaccagtaaaatgggagtttgtactgtgtattgaatctgtcttcttattggcctctgt

SEQ ID NO: 3371 - DNA, 60 bp, Artificial Sequence
  oligonucleotide probe
acagggcatttctccttccaccatccacagatgttctcaataaactgtacattcattttg

SEQ ID NO: 3372 - DNA, 60 bp, Artificial Sequence
  oligonucleotide probe
cacaagtgcagcattctctaattctttctgctgtttgtcacaattgttatttaaagaacc

SEQ ID NO: 3373 - DNA, 60 bp, Artificial Sequence
  oligonucleotide probe
gtcagagtgacttgcagtttcagatgatagaggttttttaggattaaggataagctaatt

SEQ ID NO: 3374 - DNA, 60 bp, Artificial Sequence
  oligonucleotide probe
ttgaaggatttttgaacccagtgagtagataaaggattcaaaaaagaaccggaaaggtcc

SEQ ID NO: 3375 - DNA, 60 bp, Artificial Sequence
  oligonucleotide probe
ctctatgtagttcccagttatgtttttaggggtaataaagttcatggctgttggatcacc

SEQ ID NO: 3376 - DNA, 60 bp, Artificial Sequence
  oligonucleotide probe
tagttgataagtggttatgataaaaatctgttgcaaagaccctcttgaaattagtgtgcc

SEQ ID NO: 3377 - DNA, 60 bp, Artificial Sequence
  oligonucleotide probe
tcctgagaggttttcattaagatagatgggtcactttcaaatgaggatgttgtacacacg

SEQ ID NO: 3378 - DNA, 60 bp, Artificial Sequence
  oligonucleotide probe
ttcgattttgttcctttctagccatcaagcccctctctgaataagggtcttcccttgagt

SEQ ID NO: 3379 - DNA, 60 bp, Artificial Sequence
  oligonucleotide probe
ctgaagtaaaagtactgagttttccacttaccagtacttttgagtactgtagcaagtggc

SEQ ID NO: 3380 - DNA, 60 bp, Artificial Sequence
  oligonucleotide probe
ggctagtcctaaagtttcttccaagtttatgctgttttagaattctgccatataatctac

SEQ ID NO: 3381 - DNA, 60 bp, Artificial Sequence
  oligonucleotide probe
agaaatcctccatggtggacaagatttttgaaggaaacagcaataccaaggggcacatga

SEQ ID NO: 3382 - DNA, 60 bp, Artificial Sequence
  oligonucleotide probe
gctgtttgtatgagatggctcatagatattatgacaaagcctttgttatccaggccatgg

SEQ ID NO: 3383 - DNA, 60 bp, Artificial Sequence
  oligonucleotide probe
gggatttatggtggatcattgcagacagtgctaaaaatgtagagcacaagacaagtttac

SEQ ID NO: 3384 - DNA, 60 bp, Artificial Sequence
  oligonucleotide probe
tgagtctcgacggaaatccttggagttttcagattcagaaacttttctctataatggtct

SEQ ID NO: 3385 - DNA, 60 bp, Artificial Sequence
  oligonucleotide probe
gagattcaagttctctcagcttaagggatcctcagatgatgggaagactcgagtaaagct

SEQ ID NO: 3386 - DNA, 60 bp, Artificial Sequence
  oligonucleotide probe
tcatttctacccatgttgggaaaaactggctttttccccatttctttacagggcaaaaaa

SEQ ID NO: 3387 - DNA, 60 bp, Artificial Sequence
  oligonucleotide probe
ttaatccaagagaggaccaaagggaacaaatcatcgtatcacaggctgagtgagcttgtg

SEQ ID NO: 3388 - DNA, 60 bp, Artificial Sequence
  oligonucleotide probe
cacacttctttgctggtatcactttgtaagtagcaatcataagtaagctgtttagcaaaa

SEQ ID NO: 3389 - DNA, 60 bp, Artificial Sequence
  oligonucleotide probe
ccaaacacctagtcaatacagatttgtatgtgaagctattctgaaagtttatgaagaagg

SEQ ID NO: 3390 - DNA, 60 bp, Artificial Sequence
  oligonucleotide probe
ggtttcctcttcttgaatgttgtgtgatgtgagtgaaataagagactcttgtgttgcatt

SEQ ID NO: 3391 - DNA, 60 bp, Artificial Sequence
  oligonucleotide probe
ttaacagaaagcaaaatttcctgcagctttgtggacgcttaaagcatgtttgcaaatatt

SEQ ID NO: 3392 - DNA, 60 bp, Artificial Sequence
  oligonucleotide probe
ttctttaaccagccttgagctgtacagctgtagaaagctattaaataaagctttgacttg

SEQ ID NO: 3393 - DNA, 60 bp, Artificial Sequence
  oligonucleotide probe
tcccatttgtgttagaagctgaggaaatgcgaagtcaattgtttcctttttatcactatg

SEQ ID NO: 3394 - DNA, 60 bp, Artificial Sequence
  oligonucleotide probe
gtgctaatgattatgctatttcacagaccaaacgttttagtacattgatacccttagatg

SEQ ID NO: 3395 - DNA, 60 bp, Artificial Sequence
  oligonucleotide probe
ccagcatttgtttgtagtttttatatgtgattgtgctattgtgctgtgttaagctaatgg

SEQ ID NO: 3396 - DNA, 60 bp, Artificial Sequence
  oligonucleotide probe
aggtagattgagaggagtgtgacttgttaagttgctaaggctggaattctcaacctgtac

SEQ ID NO: 3397 - DNA, 60 bp, Artificial Sequence
  oligonucleotide probe
aatcaacctctcagaccttttgtgcttccccattttattgtgtaacaacatcacatactt

SEQ ID NO: 3398 - DNA, 60 bp, Artificial Sequence
  oligonucleotide probe
ccacccagtaacacatcatttcagtacctgctattaatggtcttttgataaataatcact

SEQ ID NO: 3399 - DNA, 60 bp, Artificial Sequence
  oligonucleotide probe
aagacctgcagaagattcagtgaaggttgaagaatagaatgtctgctgaatgtgcaagcc

SEQ ID NO: 3400 - DNA, 60 bp, Artificial Sequence
  oligonucleotide probe
tacaagtgcagacaatgtggtattcttttgtaactgagtcctgaaatgttctgtagtgtt

SEQ ID NO: 3401 - DNA, 60 bp, Artificial Sequence
  oligonucleotide probe
gaaccagcatccctaccatcaacatggagaacaagaccacatggttctctgtggacattg

SEQ ID NO: 3402 - DNA, 60 bp, Artificial Sequence
  oligonucleotide probe
ggcttaagtttccttaaatgtgttcttttgagataagattctactgtactgacttggtct

SEQ ID NO: 3403 - DNA, 60 bp, Artificial Sequence
  oligonucleotide probe
gcctcagcggatatgtttatacagatgaatataaattctctttacttttggctgtttcac

SEQ ID NO: 3404 - DNA, 60 bp, Artificial Sequence
  oligonucleotide probe
cttctaccggaaattgtttttggaaatcgtcaatgagaaatccagatactctctgcatga

SEQ ID NO: 3405 - DNA, 60 bp, Artificial Sequence
  oligonucleotide probe
tcgtgagtagtgggcaaataaagaaacctctggtgttgtgttttccctggagaggacact

SEQ ID NO: 3406 - DNA, 60 bp, Artificial Sequence
  oligonucleotide probe
gcttggaacgtttctctcagatttcccatggcttctaataaactgagtgactttaactgt

SEQ ID NO: 3407 - DNA, 60 bp, Artificial Sequence
  oligonucleotide probe
ttgcttgggtgagatctgactttccagagctgtcaagcagggagaggaagagactccggg

SEQ ID NO: 3408 - DNA, 60 bp, Artificial Sequence
  oligonucleotide probe
cctcaccctctcataaatgtggatctgttttttacagttggtttatttgtatcaggatta

SEQ ID NO: 3409 - DNA, 60 bp, Artificial Sequence
  oligonucleotide probe
atgacccttgactgggggctgtgtaatatgtttctgttataagatagacattgggagggg

SEQ ID NO: 3410 - DNA, 60 bp, Artificial Sequence
  oligonucleotide probe
tttggacttgcgtatttagccccctggaacagagttgttctggatttcaaagataagact

SEQ ID NO: 3411 - DNA, 60 bp, Artificial Sequence
  oligonucleotide probe
accactagtgcctttgggtttctttgccaaaaacttaagccagcctctatcaccaaaaaa

SEQ ID NO: 3412 - DNA, 60 bp, Artificial Sequence
  oligonucleotide probe
cgtatctatttcatgctttgtactatgcatgtgccaataaacaagttgtcttcaaaaccc

SEQ ID NO: 3413 - DNA, 60 bp, Artificial Sequence
  oligonucleotide probe
gacatccaaagcaatatttattcttggaaggtctatttgacgttagcatgtataacactg

SEQ ID NO: 3414 - DNA, 60 bp, Artificial Sequence
  oligonucleotide probe
gaaggtagaaaaggatagaaacatcttgtctagtgatcctgacatttagatagcaaagaa

SEQ ID NO: 3415 - DNA, 60 bp, Artificial Sequence
  oligonucleotide probe
catgcagtaccaacatgggacattgccttaacttttgatgcactttcatggagactgact

SEQ ID NO: 3416 - DNA, 60 bp, Artificial Sequence
  oligonucleotide probe
ggccttcactattcagtgtattcaattaagttcaatgtaggtcataaatcagctttttcg

SEQ ID NO: 3417 - DNA, 60 bp, Artificial Sequence
  oligonucleotide probe
gggaaatttgagagtggatttccacaaatttccaagttttttggatatacacctccaaaa

SEQ ID NO: 3418 - DNA, 60 bp, Artificial Sequence
  oligonucleotide probe
gccaagtaggaattccttatttaatttacctcctatgcaatgattaatgctgcgaaatgt

SEQ ID NO: 3419 - DNA, 60 bp, Artificial Sequence
  oligonucleotide probe
tacaagcaaaacatacactaacatggtctgtagctattaaaagcacacaatctgaagggc

SEQ ID NO: 3420 - DNA, 60 bp, Artificial Sequence
  oligonucleotide probe
cttcctgaaatgtctaaattgtgttgaaacccatcactacctatggacccatccataaac

SEQ ID NO: 3421 - DNA, 60 bp, Artificial Sequence
  oligonucleotide probe
agtcatgtctccacctggaatttattatgaccttttttcactgtatgtacttcatatgtc

SEQ ID NO: 3422 - DNA, 60 bp, Artificial Sequence
  oligonucleotide probe
gatggaagaagagaatgagccacagtcattgtgaaaatgtcaaacgaggcttccgttttg

SEQ ID NO: 3423 - DNA, 60 bp, Artificial Sequence
  oligonucleotide probe
ctggtttctaaggatgttggtttggaccttatgagagtggataaaactgagtctgagtcg

SEQ ID NO: 3424 - DNA, 60 bp, Artificial Sequence
  oligonucleotide probe
atttagtgtgagaggtaaaagctaaaaatcatctggccatagtcttcatgggtcactggt

SEQ ID NO: 3425 - DNA, 60 bp, Artificial Sequence
  oligonucleotide probe
ctacctcacatccgtatcattggattgaaaattcaagtgtagatatagttgctgaagaca

SEQ ID NO: 3426 - DNA, 60 bp, Artificial Sequence
  oligonucleotide probe
cgcgtctttgaaatgcctgttgaatatctagagtttagtaccaacttctacaaacttttt

SEQ ID NO: 3427 - DNA, 60 bp, Artificial Sequence
  oligonucleotide probe
caacagcacttgtgttaacagctatgcaatatgtactggtaacgagtacttgataaatca

SEQ ID NO: 3428 - DNA, 60 bp, Artificial Sequence
  oligonucleotide probe
gccaacctctaacaagagtaggttgatagacaagtaaattaagagtttgttatcaattcc

SEQ ID NO: 3429 - DNA, 60 bp, Artificial Sequence
  oligonucleotide probe
gagccaaggacttttgttaccttagttttcaaaggatatgtcttcagatttctagattct

SEQ ID NO: 3430 - DNA, 60 bp, Artificial Sequence
  oligonucleotide probe
atgaggaagctgctcaggtagcagatggctggacctaataaaatgtcaaactagaaaaaa

SEQ ID NO: 3431 - DNA, 60 bp, Artificial Sequence
  oligonucleotide probe
tttcctataatttgtaaagcttgtgaaaaagccactatcgtgattttttaaatcaagtag

SEQ ID NO: 3432 - DNA, 60 bp, Artificial Sequence
  oligonucleotide probe
ctttgaggagagatagaagggacagacctgaacagagatagaaattaacaatttacgtat

SEQ ID NO: 3433 - DNA, 60 bp, Artificial Sequence
  oligonucleotide probe
agtgatccagaaagtgaattttaggactgatgacagtggcctaacagaacagagtgtggc

SEQ ID NO: 3434 - DNA, 60 bp, Artificial Sequence
  oligonucleotide probe
ctttaaagccctgggttcaatcctcaacagtacaaacaaaggaaaacaaaaaccatgcac

SEQ ID NO: 3435 - DNA, 60 bp, Artificial Sequence
  oligonucleotide probe
ctgccaccatttttgagaagtcatgtacgaaaaatcaaagatcagtaaaattttgttgcc

SEQ ID NO: 3436 - DNA, 60 bp, Artificial Sequence
  oligonucleotide probe
gaaagagccctgctgaaaaggaatactttgactacttggtgaatatttttgtgaatatcg

SEQ ID NO: 3437 - DNA, 60 bp, Artificial Sequence
  oligonucleotide probe
agttgacttggaactgtgcttgcagcttcctttccctgtttatccaataaacttccccca

SEQ ID NO: 3438 - DNA, 60 bp, Artificial Sequence
  oligonucleotide probe
gattctctcactgtagcattcttggctgtatgtttgtccttgaaagaatattatatggtt

SEQ ID NO: 3439 - DNA, 60 bp, Artificial Sequence
  oligonucleotide probe
gggaagaatatagagggcaaaccgacttgtatagatcgaataaagctagatttgatacaa

SEQ ID NO: 3440 - DNA, 60 bp, Artificial Sequence
  oligonucleotide probe
ctttagaaggcaattatcctgattgtatgtttgcatcttgggcaaaaacagaaaaagaga

SEQ ID NO: 3441 - DNA, 60 bp, Artificial Sequence
  oligonucleotide probe
gccttgaagttattgaagctataaatatggtgatcaaaagatcactcttcatctcgcttt

SEQ ID NO: 3442 - DNA, 60 bp, Artificial Sequence
  oligonucleotide probe
ggaaaaggtagacgagctaaagaagaaatacggaatataaatcaccagatttggtggcca

SEQ ID NO: 3443 - DNA, 60 bp, Artificial Sequence
  oligonucleotide probe
gactcttaacattttagaaaggaatttctgaaggtcagaaactacataccaagccaatag

SEQ ID NO: 3444 - DNA, 60 bp, Artificial Sequence
  oligonucleotide probe
agatgatatttcagacttgtgtgctatgttgagtgaacttccttgcctaatctaaactcc

SEQ ID NO: 3445 - DNA, 60 bp, Artificial Sequence
  oligonucleotide probe
ctcaacaaagaaattgaaatatgtccatacgtcacccagaataaacacaatgtgaagtct

SEQ ID NO: 3446 - DNA, 60 bp, Artificial Sequence
  oligonucleotide probe
ggtctgtaagtcaggcaagtccactgccgtagcacaacacacacaaatatacaaatgatg

SEQ ID NO: 3447 - DNA, 60 bp, Artificial Sequence
  oligonucleotide probe
gcagaactaaactgggtttatctggaaagcccaatgacaagatgtatatagaaatttaca

SEQ ID NO: 3448 - DNA, 60 bp, Artificial Sequence
  oligonucleotide probe
ccttccttttattgtaagcgagtgatacagagtgtttattcttacctatggctgaattaa

SEQ ID NO: 3449 - DNA, 60 bp, Artificial Sequence
  oligonucleotide probe
agacaggagagatcgaaacgtatgcaaatcaatgcaaaaatagatcttagctcagttgtg

SEQ ID NO: 3450 - DNA, 60 bp, Artificial Sequence
  oligonucleotide probe
tacattatagttataatctttgatttttcatttagagaaatttatacttagtagtaagat

SEQ ID NO: 3451 - DNA, 60 bp, Artificial Sequence
  oligonucleotide probe
aatgatgctgctatgtttaatgactatgctacatgttaattctcagcatgaaagtgaagg

SEQ ID NO: 3452 - DNA, 60 bp, Artificial Sequence
  oligonucleotide probe
ccgagtttgttatggtttctattcttacaactaacggtatcaaaaccacttcctgggatt

SEQ ID NO: 3453 - DNA, 60 bp, Artificial Sequence
  oligonucleotide probe
gtttttattcactggaatcggactgatgattagtactgtgtttccctttgaaaatgaagt

SEQ ID NO: 3454 - DNA, 60 bp, Artificial Sequence
  oligonucleotide probe
caaaaaagaacaaataaaacagaaggcattgaagttcacgagtagtcttccagcctctca

SEQ ID NO: 3455 - DNA, 60 bp, Artificial Sequence
  oligonucleotide probe
cgtgaactagaagaggctcgagcatctagagatgagatttttgctcaatccaaagaaagc

SEQ ID NO: 3456 - DNA, 60 bp, Artificial Sequence
  oligonucleotide probe
gcagaaaaaccttaggatgagagagcggcactcaataaagcagccagagattttattgtc

SEQ ID NO: 3457 - DNA, 60 bp, Artificial Sequence
  oligonucleotide probe
gcctcctgtgtaatcaacatcacgtttccaactataaatcatagtgtctaaaggaaaaaa

SEQ ID NO: 3458 - DNA, 60 bp, Artificial Sequence
  oligonucleotide probe
ggattgctgacaaactgctcttgattgtttctttaaggaactgctttctctccctgactc

SEQ ID NO: 3459 - DNA, 60 bp, Artificial Sequence
  oligonucleotide probe
tcccaggcttcagcattaattgttgtgataaatttgtaattgtagcttgttctccaccac

SEQ ID NO: 3460 - DNA, 60 bp, Artificial Sequence
  oligonucleotide probe
ccacttctaagatctccagagatctttgaagctgtaagaaatacaagaattgtaaatgac

SEQ ID NO: 3461 - DNA, 60 bp, Artificial Sequence
  oligonucleotide probe
tttccccttcccttacaagccggtgtaacactaatttatctatccacagtggattcaata

SEQ ID NO: 3462 - DNA, 60 bp, Artificial Sequence
  oligonucleotide probe
gctccaaggacaagtgaaggtcagctgcctagccgtccaaccagctagtgatgtcaaaag

SEQ ID NO: 3463 - DNA, 60 bp, Artificial Sequence
  oligonucleotide probe
actttcatgaccctttcactcacctgaaatgtagaaaaatgggttcagtgtaaggataag

SEQ ID NO: 3464 - DNA, 60 bp, Artificial Sequence
  oligonucleotide probe
atcctgcgttaaggctatagaggtttgacatcacaagcaagagatctgatgtggttttca

SEQ ID NO: 3465 - DNA, 60 bp, Artificial Sequence
  oligonucleotide probe
atacaaactcaaagtgcagttacagacactgtaaatgaaaaccgacagtacaagctctga

SEQ ID NO: 3466 - DNA, 60 bp, Artificial Sequence
  oligonucleotide probe
catggaaattctccattgatttctttcctgtcctgttcaataaatgattacacttgcact

SEQ ID NO: 3467 - DNA, 60 bp, Artificial Sequence
  oligonucleotide probe
ctgtgacatgagacacttcctcttatgtactgtgtcgtgaataaaccgtttttactttag

SEQ ID NO: 3468 - DNA, 60 bp, Artificial Sequence
  oligonucleotide probe
ccaagaattgtgttgaagtccaagaatgggatccacttgcatctcaaaaagctccaataa

SEQ ID NO: 3469 - DNA, 60 bp, Artificial Sequence
  oligonucleotide probe
gtcttcactgtggatgagaaaatactgaatgatgtatcccaagccaaagcccaacatctc

SEQ ID NO: 3470 - DNA, 60 bp, Artificial Sequence
  oligonucleotide probe
cgtgaagctgaaaatgatggtgtctgtgagtatgttttgcaaattcaaaatatagtttgg

SEQ ID NO: 3471 - DNA, 60 bp, Artificial Sequence
  oligonucleotide probe
cacgatcacaagaaagacgtggtcctgacagacagacaatcctattccctaccaaaatga

SEQ ID NO: 3472 - DNA, 60 bp, Artificial Sequence
  oligonucleotide probe
gtagccatggactttctgttaatactttgagccttgacagaagatgatgctgagttctgc

SEQ ID NO: 3473 - DNA, 60 bp, Artificial Sequence
  oligonucleotide probe
gattgctgatgtcctgatagcattttatagtagtaacagagagatttacacatctttctc

SEQ ID NO: 3474 - DNA, 60 bp, Artificial Sequence
  oligonucleotide probe
gaaaccaaatcgaagagcctaggttgtactttaattactgatataccttagtaacactga

SEQ ID NO: 3475 - DNA, 60 bp, Artificial Sequence
  oligonucleotide probe
gcacaatcgtgagtagatcagaaaagcaccttttaatagtcagttgagtagcacagagaa

SEQ ID NO: 3476 - DNA, 60 bp, Artificial Sequence
  oligonucleotide probe
atccagttcttcacgttagctgtagcagttagctaaaatgcacagaaaacatacttgagc

SEQ ID NO: 3477 - DNA, 60 bp, Artificial Sequence
  oligonucleotide probe
atctctatggatatcgcccctacgacaagaacattcaatcccgggagaatatcctggttt

SEQ ID NO: 3478 - DNA, 60 bp, Artificial Sequence
  oligonucleotide probe
agaagacatccgtcctgaaatgaaagaagatattcacgaccccacctatcaggatgagga

SEQ ID NO: 3479 - DNA, 60 bp, Artificial Sequence
  oligonucleotide probe
gactgaagagacaagagcttcttgtccccgttttcccagcactaataaagtttgtaagac

SEQ ID NO: 3480 - DNA, 60 bp, Artificial Sequence
  oligonucleotide probe
aacatcaacagagatgcaggaaggagatccaaagtctcctaggagatgggacttctatca

SEQ ID NO: 3481 - DNA, 60 bp, Artificial Sequence
  oligonucleotide probe
agctagtggtatctcctggatcttctatgctttggccacaaatcctgaacatcaacagag

SEQ ID NO: 3482 - DNA, 60 bp, Artificial Sequence
  oligonucleotide probe
tacccaaaggtatccatgtcatgctgtccttttatggccttcatcacaacccaactgtgt

SEQ ID NO: 3483 - DNA, 60 bp, Artificial Sequence
  oligonucleotide probe
tgaaatgcaatagctcgcttttaataacaacatacaaaatctggagaaagccccaaagta

SEQ ID NO: 3484 - DNA, 60 bp, Artificial Sequence
  oligonucleotide probe
gagctcatggcatgagtaaatacatctctcaatgcctacctttctatcagatattaaaat

SEQ ID NO: 3485 - DNA, 60 bp, Artificial Sequence
  oligonucleotide probe
gagaaagccatttcagaatttctatcttttcttgtatgtttccatgttgtcaggtagttg

SEQ ID NO: 3486 - DNA, 60 bp, Artificial Sequence
  oligonucleotide probe
ttctgtgtatctagagactcctgactttgaagttgctttaaagcctgtgtggtttccggc

SEQ ID NO: 3487 - DNA, 60 bp, Artificial Sequence
  oligonucleotide probe
acaagcctccaagacggtccaggatgcgctaagtagcgtgcaggagtccgatatagctgt

SEQ ID NO: 3488 - DNA, 60 bp, Artificial Sequence
  oligonucleotide probe
ttgtcaacattgtcaatgacatctttggagctggctttgacacagtcaccacagccatca

SEQ ID NO: 3489 - DNA, 60 bp, Artificial Sequence
  oligonucleotide probe
cgcttttccaagtgaagattgtcgaggcatcggtggggccgtcacccttgtttcttttcc

SEQ ID NO: 3490 - DNA, 60 bp, Artificial Sequence
  oligonucleotide probe
tatctacataaaccagtggcaggtcaaccatgatgagaagcagtggaaagacccctttgt

SEQ ID NO: 3491 - DNA, 60 bp, Artificial Sequence
  oligonucleotide probe
ctacttgtgggtctagggtaatgaacacatagatctatttgacttaataagtaggaaccc

SEQ ID NO: 3492 - DNA, 60 bp, Artificial Sequence
  oligonucleotide probe
taaaatgctggagattgacccccaaaaagtaaatatccacggaggagctgtttctctggg

SEQ ID NO: 3493 - DNA, 60 bp, Artificial Sequence
  oligonucleotide probe
tagacaacctgttttaggagacagttccatgtgaccggctgaagtaaatgtgactccctt

SEQ ID NO: 3494 - DNA, 60 bp, Artificial Sequence
  oligonucleotide probe
tgttaagccattgcacgaattgcagcatttgctgatgctgccgtagaccccattgatttt

SEQ ID NO: 3495 - DNA, 60 bp, Artificial Sequence
  oligonucleotide probe
gtacactgtataaatttttcgttcccttgctctttgtggttgggtctaacactaactgta

SEQ ID NO: 3496 - DNA, 60 bp, Artificial Sequence
  oligonucleotide probe
cttaagaaaaatgaaattcttatttctggtataattaccccaatattaaattcaagtctt

SEQ ID NO: 3497 - DNA, 60 bp, Artificial Sequence
  oligonucleotide probe
ttcttattcctttcacgttctctaccatagaggcaatgtcatggtccctctcagggtaca

SEQ ID NO: 3498 - DNA, 60 bp, Artificial Sequence
  oligonucleotide probe
taaacctcctccacctgtgttagaggtttcatgggaatgtcaataaagaaaagaagggct

SEQ ID NO: 3499 - DNA, 60 bp, Artificial Sequence
  oligonucleotide probe
attctcagctcctgagaggttgttctctgcttttgactcctgagctggttgtgttaaaat

SEQ ID NO: 3500 - DNA, 60 bp, Artificial Sequence
  oligonucleotide probe
gaaaggtagagagaaatgaatagtttttgctactttgggccaaactgtgaaaaaatccat

SEQ ID NO: 3501 - DNA, 60 bp, Artificial Sequence
  oligonucleotide probe
catggatgtggagtcttttgtgaccatggggagaaactataaagaagtgtttgctgtcca

SEQ ID NO: 3502 - DNA, 60 bp, Artificial Sequence
  oligonucleotide probe
cacctgtacatatcccagagaacaatcactattcttaagcactttgaagatatttctatg

SEQ ID NO: 3503 - DNA, 60 bp, Artificial Sequence
  oligonucleotide probe
caggccatttttacaggtaatgtgtacagaggttgttttcattcatgcaacttttttctt

SEQ ID NO: 3504 - DNA, 60 bp, Artificial Sequence
  oligonucleotide probe
aagaactgcgtttcctaccgagatcctgtgaatggaacctggtatattcagtcactttgc

SEQ ID NO: 3505 - DNA, 60 bp, Artificial Sequence
  oligonucleotide probe
tggttcttatgcacaggacagacagtggtgtgtcactgcagacttatgatgacctggtgg

SEQ ID NO: 3506 - DNA, 60 bp, Artificial Sequence
  oligonucleotide probe
aggacacatgtcctgtgggaggtgaagcctcatctcgctactcaataaagcaactgagaa

SEQ ID NO: 3507 - DNA, 60 bp, Artificial Sequence
  oligonucleotide probe
agtgtttctagatggcaaagaaataaagcaactgaatgtccagtggctccgagcacagct

SEQ ID NO: 3508 - DNA, 60 bp, Artificial Sequence
  oligonucleotide probe
tacatcgtctccaagtacttaggagttagctctcctttcctggctgaggtactttctgaa

SEQ ID NO: 3509 - DNA, 60 bp, Artificial Sequence
  oligonucleotide probe
aacttttcaaaatttccaagacagacagctgaggaaaagagataccccagctgccctctg

SEQ ID NO: 3510 - DNA, 60 bp, Artificial Sequence
  oligonucleotide probe
aatgggcttcttacctgctttgaaatgggtgctcttcttgaataatgcggacttggagag

SEQ ID NO: 3511 - DNA, 60 bp, Artificial Sequence
  oligonucleotide probe
ctactccctgcacatccccaactgtgacaagcatggccggtacaaccttaagcagtgcaa

SEQ ID NO: 3512 - DNA, 60 bp, Artificial Sequence
  oligonucleotide probe
aagcccctcaagtcaggcatgaaggagctggctgtgttccgggagaaggtcaatgaacag

SEQ ID NO: 3513 - DNA, 60 bp, Artificial Sequence
  oligonucleotide probe
catctcttctacaacgagcagcaggagactggtggggcccatgcccaaagtgtgcagtaa

SEQ ID NO: 3514 - DNA, 60 bp, Artificial Sequence
  oligonucleotide probe
aattaagctctgatgatgcacatggacctgtgacaaaagtgacatccatcagggtccaga

SEQ ID NO: 3515 - DNA, 60 bp, Artificial Sequence
  oligonucleotide probe
ttattacggtgagctgtagtgcacattggtttctttagtaattctaagccgatacaggtt

SEQ ID NO: 3516 - DNA, 60 bp, Artificial Sequence
  oligonucleotide probe
ctggagccccgtcttagcttagtaacttcttaacctatagctattgctctttcgtcctta

SEQ ID NO: 3517 - DNA, 60 bp, Artificial Sequence
  oligonucleotide probe
cgcctgcaaattatattctctttaaaggcaaatggaagaagccattcgatcctgagaaca

SEQ ID NO: 3518 - DNA, 60 bp, Artificial Sequence
  oligonucleotide probe
agtacttgctggactcaaatacctggattgaggagatgccttcggaacaaatgtgcaaga

SEQ ID NO: 3519 - DNA, 60 bp, Artificial Sequence
  oligonucleotide probe
aactacgagttcaatggaaagaaactctttcaacacatcgcggagtacctgcccagttac

SEQ ID NO: 3520 - DNA, 60 bp, Artificial Sequence
  oligonucleotide probe
tttgtgcccatgactgagaacatttataatgccataattgataaaactctgaagctctga

SEQ ID NO: 3521 - DNA, 60 bp, Artificial Sequence
  oligonucleotide probe
actcagagatgtctttaagaaaggcgacatctacttcaacagcggagacctcctgatgat

SEQ ID NO: 3522 - DNA, 60 bp, Artificial Sequence
  oligonucleotide probe
tggtattgtagaccttttacctctcatccgttgtgcttactaacaaaatgtgaaaagcaa

SEQ ID NO: 3523 - DNA, 60 bp, Artificial Sequence
  oligonucleotide probe
ctggtggtggaatgtgttatgaaaggcgtgacttccacaagagtttatgaaagggcatga

SEQ ID NO: 3524 - DNA, 60 bp, Artificial Sequence
  oligonucleotide probe
cccagagaatactctgagcattctttcgccctaaaaaagcaagtttcctagatcttaatg

SEQ ID NO: 3525 - DNA, 60 bp, Artificial Sequence
  oligonucleotide probe
agagcaatgacttttgctaacagtatttcttttctgttgtaaagtggacagatgatacac

SEQ ID NO: 3526 - DNA, 60 bp, Artificial Sequence
  oligonucleotide probe
ctgtactacagagatgcccgttcgtataaccggtttcaaattgccactgtgactgaaaag

SEQ ID NO: 3527 - DNA, 60 bp, Artificial Sequence
  oligonucleotide probe
catagtggttgtatcggctttacctcacactgaatgaaacaatgataactaatgtaacat

SEQ ID NO: 3528 - DNA, 60 bp, Artificial Sequence
  oligonucleotide probe
aaatcgcctttgactccaatcctgcttgggaacccaggaaggaagatcatggaatttttt

SEQ ID NO: 3529 - DNA, 60 bp, Artificial Sequence
  oligonucleotide probe
tacccacaaaagtatctttccagagatacacaaattttggggtacacctcatcatgagaa

SEQ ID NO: 3530 - DNA, 60 bp, Artificial Sequence
  oligonucleotide probe
atggaagctgaaatactgaaagaaattcgagaagctgcaaatgccatgaaattggagcga

SEQ ID NO: 3531 - DNA, 60 bp, Artificial Sequence
  oligonucleotide probe
cactgaagaattgtccactgatcgacaacatctgtgcttttgccaaaagtgaccagtcct

SEQ ID NO: 3532 - DNA, 60 bp, Artificial Sequence
  oligonucleotide probe
aaagacgttgagcggatgtatgggggcaaataaaatgcggctctctgatttccatttgca

SEQ ID NO: 3533 - DNA, 60 bp, Artificial Sequence
  oligonucleotide probe
gttatcttgcatctgaaagaagaccaacagggtaattcggagaaagagaataaggagatt

SEQ ID NO: 3534 - DNA, 60 bp, Artificial Sequence
  oligonucleotide probe
cacaaaaatgtctgactaactgtatgtactatgtatgccagttgggttgttaatcaagaa

SEQ ID NO: 3535 - DNA, 60 bp, Artificial Sequence
  oligonucleotide probe
cagctatgaactcttatgaaggctctatgaaacagctacatctgataaacattatcacta

SEQ ID NO: 3536 - DNA, 60 bp, Artificial Sequence
  oligonucleotide probe
caaccggataagtgcattcaagagtaaacgcaggtgagagaagtcagtcagagggctggt

SEQ ID NO: 3537 - DNA, 60 bp, Artificial Sequence
  oligonucleotide probe
agtgctggcctatgagttaagacaatctttgtggttgggaataaacttccaaatcccgct

SEQ ID NO: 3538 - DNA, 60 bp, Artificial Sequence
  oligonucleotide probe
agctttacagcaagaggctgattttgaaaagcaaggcatctatttctgtgtctacccagt

SEQ ID NO: 3539 - DNA, 60 bp, Artificial Sequence
  oligonucleotide probe
ttgtccatgcagaagcttttctgtgcatcatttgaaccccattagtatcctttccagtaa

SEQ ID NO: 3540 - DNA, 60 bp, Artificial Sequence
  oligonucleotide probe
ccacattgaacaatcagagttttcacttgaaaatctggcaagcactatcaatgacctctt

SEQ ID NO: 3541 - DNA, 60 bp, Artificial Sequence
  oligonucleotide probe
agaaccctcttctctcaagacccagcaaacacatacagtttctggagttatagtacaaat

SEQ ID NO: 3542 - DNA, 60 bp, Artificial Sequence
  oligonucleotide probe
tggtccacccaaaagaaattgatattaccccagtgatgaatggatttgcctctctgccac

SEQ ID NO: 3543 - DNA, 60 bp, Artificial Sequence
  oligonucleotide probe
cagcaggtgacgcccctgtatgtagataaaccaactttgtattaaagaaagattcgtccg

SEQ ID NO: 3544 - DNA, 60 bp, Artificial Sequence
  oligonucleotide probe
actctaaaatctttgggagaactgagtgtgggacctttaggaactgggagaggaaaggat

SEQ ID NO: 3545 - DNA, 60 bp, Artificial Sequence
  oligonucleotide probe
cctggctagaatgctgattggatttatttaatttgaaacagcctttgaatacctatgaca

SEQ ID NO: 3546 - DNA, 60 bp, Artificial Sequence
  oligonucleotide probe
atagaagagatttatcaccggatccccaactcagacccatcatcaagcaaaaccaagcag

SEQ ID NO: 3547 - DNA, 60 bp, Artificial Sequence
  oligonucleotide probe
aatgctaaacccacaggactcattaacacctggaaataaagtggaacggagtttctcacg

SEQ ID NO: 3548 - DNA, 60 bp, Artificial Sequence
  oligonucleotide probe
tatgaccccatggctggatcagtgctcttagatggtcaagaagcaaagaaactcaatgtc

SEQ ID NO: 3549 - DNA, 60 bp, Artificial Sequence
  oligonucleotide probe
taagtttgaaggaagcgtgacatttaatgaagtcgtgttcaactatcccacccgggccaa

SEQ ID NO: 3550 - DNA, 60 bp, Artificial Sequence
  oligonucleotide probe
caacatccaggccggcacacagaacttatgaactcttgttacagtatatttttaaaataa

SEQ ID NO: 3551 - DNA, 60 bp, Artificial Sequence
  oligonucleotide probe
tggctaggatggaactcttcctcttcctcacaaacatcatgcagaacttccacttcaaat

SEQ ID NO: 3552 - DNA, 60 bp, Artificial Sequence
  oligonucleotide probe
ggatatttcaaaggtagccagagaagggggaaattatactatgttgtcaataggaataat

SEQ ID NO: 3553 - DNA, 60 bp, Artificial Sequence
  oligonucleotide probe
aatgaagatgccctatacggaggctgtaatccatgagatccagagatttgcagacctgat

SEQ ID NO: 3554 - DNA, 60 bp, Artificial Sequence
  oligonucleotide probe
cccatctcagtttgcaaaaagcactgacatgtatctcttctctattgtaagctttccatt

SEQ ID NO: 3555 - DNA, 60 bp, Artificial Sequence
  oligonucleotide probe
gctggttttgttgaactgaaaccctctttggagggagaatcaataaataacataaacatt

SEQ ID NO: 3556 - DNA, 60 bp, Artificial Sequence
  oligonucleotide probe
tggttcaatggaattcagtctgtggtatcgcgagtctaaaacccgagtgaaaaatcgggt

SEQ ID NO: 3557 - DNA, 60 bp, Artificial Sequence
  oligonucleotide probe
aagtatgaaaggctatctacaggcaggggatatgtctctcggagaagaaaagagagccta

SEQ ID NO: 3558 - DNA, 60 bp, Artificial Sequence
  oligonucleotide probe
gcagtggagaacttcagttgattaaagttgaacctattcaggagaagacccacagtgtcc

SEQ ID NO: 3559 - DNA, 60 bp, Artificial Sequence
  oligonucleotide probe
gtgcaaatgagatccaactccaattcaacaatctgagagagaaaacttaatccaatggca

SEQ ID NO: 3560 - DNA, 60 bp, Artificial Sequence
  oligonucleotide probe
ttggcgtgactcttgactatctattagaaacgccacctaactgctaaatggtgtttggtc

SEQ ID NO: 3561 - DNA, 60 bp, Artificial Sequence
  oligonucleotide probe
tgcccttctcaacaggacaaatttttgatcaaaagtctgtgggaaagcgcatttgtcttg

SEQ ID NO: 3562 - DNA, 60 bp, Artificial Sequence
  oligonucleotide probe
ttccagtcatggtaggcagggcaggctgagccatgcaaaataaaccaatcttgtggctgc

SEQ ID NO: 3563 - DNA, 60 bp, Artificial Sequence
  oligonucleotide probe
atattatagtactaatgcatataattaaaaactatctaatactttcatatcaataaaaaa

SEQ ID NO: 3564 - DNA, 60 bp, Artificial Sequence
  oligonucleotide probe
gcagtacattcaaaactcctaatccaaaccattatatgtccaaggacaaactcaaaaaag

SEQ ID NO: 3565 - DNA, 60 bp, Artificial Sequence
  oligonucleotide probe
cgtgcttctcggatttctgaggaaatattttatattgtatattacaatgatcactggctg

SEQ ID NO: 3566 - DNA, 60 bp, Artificial Sequence
  oligonucleotide probe
gcttcctggagaagagcctgagggagaaggtcaactcctttatgagcaccctggaaaaaa

SEQ ID NO: 3567 - DNA, 60 bp, Artificial Sequence
  oligonucleotide probe
tgcaaaaatcgaccagctgcagaagaatctggccccgctggtggaagacgtgcagagcaa

SEQ ID NO: 3568 - DNA, 60 bp, Artificial Sequence
  oligonucleotide probe
ccaacttgagtcctgtgggaggtgaagcctcatctcgctactcaataaagcaactgagaa

SEQ ID NO: 3569 - DNA, 60 bp, Artificial Sequence
  oligonucleotide probe
taatcaagtccttcagcaagtagagacacacaagacaggtgctgctgccttcttttgaca

SEQ ID NO: 3570 - DNA, 60 bp, Artificial Sequence
  oligonucleotide probe
gtagtgttttgaaatgataggccctacctttgaagtttctaagacttattatgggatgta

SEQ ID NO: 3571 - DNA, 60 bp, Artificial Sequence
  oligonucleotide probe
agcattcccgagaagcatggacatggagttttgttttaataaaccaaaaaccagaaaaaa

SEQ ID NO: 3572 - DNA, 60 bp, Artificial Sequence
  oligonucleotide probe
gggctaactgtctttatggaaggcacttgttacagtatttgcccattgtacagagcaatg

SEQ ID NO: 3573 - DNA, 60 bp, Artificial Sequence
  oligonucleotide probe
agttggggttcactgtcataggcctccattgatatctctctcacatgatcttcccttaac

SEQ ID NO: 3574 - DNA, 60 bp, Artificial Sequence
  oligonucleotide probe
gaggagaattataaactgaaacaaatactcgcagttaattgaagaccttccattgatgga

SEQ ID NO: 3575 - DNA, 60 bp, Artificial Sequence
  oligonucleotide probe
gtgtcttaattattatttgtgttttaatttaaacgtctcctgatatacgctgcctgccct

SEQ ID NO: 3576 - DNA, 60 bp, Artificial Sequence
  oligonucleotide probe
tgacagatttctatcactccaagcgcagattggtcttctgcaagagaaaaccctgaagtg

SEQ ID NO: 3577 - DNA, 60 bp, Artificial Sequence
  oligonucleotide probe
cgtcaagactaattgctatagtttacacctagatattccatctctttttaaacgtggcat

SEQ ID NO: 3578 - DNA, 60 bp, Artificial Sequence
  oligonucleotide probe
gggtcacagaatgactctagagcgtcataaattaggttacctaaaaagcagggcctagac

SEQ ID NO: 3579 - DNA, 60 bp, Artificial Sequence
  oligonucleotide probe
aagcaaaatcttggagaagctgaaagtgtggcagagaagctttgcagagtaaggctgcat

SEQ ID NO: 3580 - DNA, 60 bp, Artificial Sequence
  oligonucleotide probe
cggaacaagcaaatgtccagggagatattttgcagtgaacgaaatgaagctactgctgat

SEQ ID NO: 3581 - DNA, 60 bp, Artificial Sequence
  oligonucleotide probe
ggtcacaaaacctgtcataaaataaagcagtgtgatggtttaaaaaatgtcatggcaatc

SEQ ID NO: 3582 - DNA, 60 bp, Artificial Sequence
  oligonucleotide probe
ctctggaaaattgccataagaataaccaaatgcaatgctactgcatagataaaccaactg

SEQ ID NO: 3583 - DNA, 60 bp, Artificial Sequence
  oligonucleotide probe
ctgtcggacacttagcgtgtctttcttttcagattgtgtacagtagattatttattttgt

SEQ ID NO: 3584 - DNA, 60 bp, Artificial Sequence
  oligonucleotide probe
gcacattatattcaataagttataagagggctggtcttaagtggactactatgtatacag

SEQ ID NO: 3585 - DNA, 60 bp, Artificial Sequence
  oligonucleotide probe
gtgttttacactgtcccactaactaccatagctttctgtctggctcttacaggatagaac

SEQ ID NO: 3586 - DNA, 60 bp, Artificial Sequence
  oligonucleotide probe
gcttttaacagctcagatgtcttcttttctatatattagaaggccacaacattactggat

SEQ ID NO: 3587 - DNA, 60 bp, Artificial Sequence
  oligonucleotide probe
cttcgaattgctaggattccttgagtggtctgaccagcaataaagactcattttgtgtta

SEQ ID NO: 3588 - DNA, 60 bp, Artificial Sequence
  oligonucleotide probe
tgcttaagaggccattggtgaaaacccctgtggattacatcgacctgccttattcttctt

SEQ ID NO: 3589 - DNA, 60 bp, Artificial Sequence
  oligonucleotide probe
tactaaaaaagagagtaactcgggagtgttgaggctttgcgtgaatgtctgagatagggc

SEQ ID NO: 3590 - DNA, 60 bp, Artificial Sequence
  oligonucleotide probe
aagtagatttgaacaaaaatggacaggttgagctgcacgagtttctgcagctgatgagcg

SEQ ID NO: 3591 - DNA, 60 bp, Artificial Sequence
  oligonucleotide probe
ccagagatgacttaaactctaaaatagtggatctcgtagctgccttttttaaaacaaaca

SEQ ID NO: 3592 - DNA, 60 bp, Artificial Sequence
  oligonucleotide probe
ctttgtatcatctcagaagcagaagtatcccttaagatctacagttttatcatctgcttt

SEQ ID NO: 3593 - DNA, 60 bp, Artificial Sequence
  oligonucleotide probe
cccagaaaagtgggtgaaggtcaagtaccccaaactcatctcctattcctacatggaacg

SEQ ID NO: 3594 - DNA, 60 bp, Artificial Sequence
  oligonucleotide probe
tacatttgaagaacacaagtagaggaagtgcaggaaacaagacctacagaatgtaggagg

SEQ ID NO: 3595 - DNA, 60 bp, Artificial Sequence
  oligonucleotide probe
gactatatagatgaattcagtactaaaaggtgctacccatgtctaaatggaggtactata

SEQ ID NO: 3596 - DNA, 60 bp, Artificial Sequence
  oligonucleotide probe
taaaaatgctgctcttgatgctctcctgatcccacaattaaactgcacgtgagcgaaaaa

SEQ ID NO: 3597 - DNA, 60 bp, Artificial Sequence
  oligonucleotide probe
gggcactgactgtctgttttccaagacgaaaatgatgcttgggttttgacttttctgcag

SEQ ID NO: 3598 - DNA, 60 bp, Artificial Sequence
  oligonucleotide probe
aatgggagaagccatgtggggaagatttctgggaaagtttctagactcaatacacaggct

SEQ ID NO: 3599 - DNA, 60 bp, Artificial Sequence
  oligonucleotide probe
aggactgtagcgctgtgtcaacaaaacatagagagttcagaagacagcctttctgtggaa

SEQ ID NO: 3600 - DNA, 60 bp, Artificial Sequence
  oligonucleotide probe
ccccacctgtatttacctgttctacttgtcacctttcaataaagcatatcaaatgttgat

SEQ ID NO: 3601 - DNA, 60 bp, Artificial Sequence
  oligonucleotide probe
gttgtgtttgtacttgtgtagagtgaaaggactgttgaataaaacctaggattagaatgc

SEQ ID NO: 3602 - DNA, 60 bp, Artificial Sequence
  oligonucleotide probe
tgcagaaggagaaggagaagctagagttcatgaaggtggctcacggccccgtgtgcaaaa

SEQ ID NO: 3603 - DNA, 60 bp, Artificial Sequence
  oligonucleotide probe
ttgagaccagacaagtcaggggttgaaacttagaaaaggtcaaaggtacagaagaaacag

SEQ ID NO: 3604 - DNA, 60 bp, Artificial Sequence
  oligonucleotide probe
atgaagatgccctatacggaggctgtaatccatgagatccagagatttgcagacatgatc

SEQ ID NO: 3605 - DNA, 60 bp, Artificial Sequence
  oligonucleotide probe
gtgagaaaaagatgactttgaaactaaagggaccaaagatctttccttagatcagatagg

SEQ ID NO: 3606 - DNA, 60 bp, Artificial Sequence
  oligonucleotide probe
aaatcgtgcatgaagggaagaaaatcaaactcaccatcacctatggacccaaagtggtcc

SEQ ID NO: 3607 - DNA, 60 bp, Artificial Sequence
  oligonucleotide probe
cgacattgtctacaagagagtcagcaagagaatttagacaaggctatatttcatattctt

SEQ ID NO: 3608 - DNA, 60 bp, Artificial Sequence
  oligonucleotide probe
gtcaaggcagtcgtcaagctggaaggtgacaataaaatggtgacaactttcaaaggcata

SEQ ID NO: 3609 - DNA, 60 bp, Artificial Sequence
  oligonucleotide probe
atgtaaagtctgtggtgtcaccaatcataaagcattctgtctccgagaggacctcctaga

SEQ ID NO: 3610 - DNA, 60 bp, Artificial Sequence
  oligonucleotide probe
ggtcacatggtcttgaattttgttggttacatatgcctttttgttgttgtttgtcttcac

SEQ ID NO: 3611 - DNA, 60 bp, Artificial Sequence
  oligonucleotide probe
tttctccaattactgggtgagtcagagctgcactggtgactcacttcaatgtgtcatttc

SEQ ID NO: 3612 - DNA, 60 bp, Artificial Sequence
  oligonucleotide probe
taccgtgaatgaatttcctagcaggccactctgcatctgttatgtctccaccggaaaaaa

SEQ ID NO: 3613 - DNA, 60 bp, Artificial Sequence
  oligonucleotide probe
tgcaacacaatgaaccagtttgtgaacaagttcaacgtcctctacgaccgacaaggcatt

SEQ ID NO: 3614 - DNA, 60 bp, Artificial Sequence
  oligonucleotide probe
tccacagactcttatactcagtgccttgtgatttctgctctcagattttttcggactggc

SEQ ID NO: 3615 - DNA, 60 bp, Artificial Sequence
  oligonucleotide probe
tgcgatgcaatcaaggagctatcacttttcattagagaaggagacaggccttttatacag

SEQ ID NO: 3616 - DNA, 60 bp, Artificial Sequence
  oligonucleotide probe
agtgagactgttgttgaaatagccgacctctgtagccttttcttagtacttgcccaaggt

SEQ ID NO: 3617 - DNA, 60 bp, Artificial Sequence
  oligonucleotide probe
gcctcctagaggaagattacatttcattaattaattcaacttcatctgtggtgattttgc

SEQ ID NO: 3618 - DNA, 60 bp, Artificial Sequence
  oligonucleotide probe
gactctactccctgctcctggatagtttataattttggggtctcttttgtaaattaaata

SEQ ID NO: 3619 - DNA, 60 bp, Artificial Sequence
  oligonucleotide probe
tgtttctagatggcaaagaaataaagcaactgaatgtccagtggctccgagctcaccttg

SEQ ID NO: 3620 - DNA, 60 bp, Artificial Sequence
  oligonucleotide probe
ctcatttttccacgaatgagtgaatggtattagagtctgcagtaaactatttatgctgaa

SEQ ID NO: 3621 - DNA, 60 bp, Artificial Sequence
  oligonucleotide probe
ttgtgtccacccagtgattctcattaaggagatttctgaaactagagccagctggactag

SEQ ID NO: 3622 - DNA, 60 bp, Artificial Sequence
  oligonucleotide probe
gctgtgtcctttcagaatttttaccaggaacataatgtggatgtgacttatgaacttaaa

SEQ ID NO: 3623 - DNA, 60 bp, Artificial Sequence
  oligonucleotide probe
gttggctgtattttcccactttcagtaaatcgttgtcaacagttccttttaaatgcaaat

SEQ ID NO: 3624 - DNA, 60 bp, Artificial Sequence
  oligonucleotide probe
ctaccctctggtagattgtcgcttatcttgtaagaaaaacaaatctcttaaattaccact

SEQ ID NO: 3625 - DNA, 60 bp, Artificial Sequence
  oligonucleotide probe
ttgatgttgccagtaaaattagcaggtgttctagtcctgtggccatctgcctagtaaagc

SEQ ID NO: 3626 - DNA, 60 bp, Artificial Sequence
  oligonucleotide probe
atatattaagtctctccctctctggagttcttggctacagcaaggccagatatcacattg

SEQ ID NO: 3627 - DNA, 60 bp, Artificial Sequence
  oligonucleotide probe
gaatgtacattctgagaaatttttgttttccctcactggaggaaactgctatcatgactg

SEQ ID NO: 3628 - DNA, 60 bp, Artificial Sequence
  oligonucleotide probe
ctcagctgcaactaataacaaccttggagagctgttatagtgttaaaagatgtaaatgat

SEQ ID NO: 3629 - DNA, 60 bp, Artificial Sequence
  oligonucleotide probe
cacatggcaaattattagcatcatcattgttattcccattgttaaaacgtgattcagagg

SEQ ID NO: 3630 - DNA, 60 bp, Artificial Sequence
  oligonucleotide probe
gctgtgaagtgcactgaaaaataaatttcaaaatgagctgtcattcatgtgttgggaaaa

SEQ ID NO: 3631 - DNA, 60 bp, Artificial Sequence
  oligonucleotide probe
gcacccacagctgttcttagaagtatataaaagactaaaatgtaactagcagacatctat

SEQ ID NO: 3632 - DNA, 60 bp, Artificial Sequence
  oligonucleotide probe
cagtttcctacagtttctgagatattctcacgtaaaaaagcaatcactaataaatacccg

SEQ ID NO: 3633 - DNA, 60 bp, Artificial Sequence
  oligonucleotide probe
gcttgtacatacaatctgggagatgagagactattagaaacttgaatacacaaagtttct

SEQ ID NO: 3634 - DNA, 60 bp, Artificial Sequence
  oligonucleotide probe
ctggcctcagactcaccaaattgctcacggtttttaaaactctgatggggagggtgtcgg

SEQ ID NO: 3635 - DNA, 60 bp, Artificial Sequence
  oligonucleotide probe
aaattttctggaaattccaatgttggacaacctgacagaagagctagacaactccaccct

SEQ ID NO: 3636 - DNA, 60 bp, Artificial Sequence
  oligonucleotide probe
ctatgctgccaccaggttatcatagaaaattagattttttgatgggttttccttttcctt

SEQ ID NO: 3637 - DNA, 60 bp, Artificial Sequence
  oligonucleotide probe
ttttcatttgagaaaaaatgtgtgatctcaaactgtgatgttctgtgattcttgcagagc

SEQ ID NO: 3638 - DNA, 60 bp, Artificial Sequence
  oligonucleotide probe
gagacctccagaagattcgattcaaccctatgaaaagataaaagccagaggcttgcctga

SEQ ID NO: 3639 - DNA, 60 bp, Artificial Sequence
  oligonucleotide probe
ggtgacgttgtgattagtgtaaattgaaaggttcgttttgaattggacgtcattttgaat

SEQ ID NO: 3640 - DNA, 60 bp, Artificial Sequence
  oligonucleotide probe
ggtttgtgagattaacaaccttaagggctacaggtgtttacttcacttaattccaacaca

SEQ ID NO: 3641 - DNA, 60 bp, Artificial Sequence
  oligonucleotide probe
gctcagcctgtcattgttaatactttggtttgtatgtatctttctaccagaagaagtttt

SEQ ID NO: 3642 - DNA, 60 bp, Artificial Sequence
  oligonucleotide probe
cgatttcttaatgtgtggtttacttgtctaaataatagtctgactgcgctatgttacttg

SEQ ID NO: 3643 - DNA, 60 bp, Artificial Sequence
  oligonucleotide probe
aggcatcatgtgatggacttttctgtatctgccctcttggattaaggaagactgagacca

SEQ ID NO: 3644 - DNA, 60 bp, Artificial Sequence
  oligonucleotide probe
cttcatctggaatcttttttccctggaatgaaactgtgcatctgaatttcagagaaataa

SEQ ID NO: 3645 - DNA, 60 bp, Artificial Sequence
  oligonucleotide probe
cagatgtgcttcatccctgtggaatgaagatgataaatagaaatgaagatgaggaaagct

SEQ ID NO: 3646 - DNA, 60 bp, Artificial Sequence
  oligonucleotide probe
ggacacttccatgatgctcattatgcaaacctctttagcgctcttttaagtttgaaacgt

SEQ ID NO: 3647 - DNA, 60 bp, Artificial Sequence
  oligonucleotide probe
cagaatcttgggaacctgaacactaagttttaggccaaaatatgagtgaaaactcttttt

SEQ ID NO: 3648 - DNA, 60 bp, Artificial Sequence
  oligonucleotide probe
actgtaattcagacgacaaccttggctattctagaagtacacttagattgttttgaccca

SEQ ID NO: 3649 - DNA, 60 bp, Artificial Sequence
  oligonucleotide probe
tggtttgtgtgggtcacacagatgaaccaccttgtcatggagattgatcttgatcactac

SEQ ID NO: 3650 - DNA, 60 bp, Artificial Sequence
  oligonucleotide probe
tggtgaagtctctctgcgccaagcatggcattgaataccaggagaagccgttgctgaggg

SEQ ID NO: 3651 - DNA, 60 bp, Artificial Sequence
  oligonucleotide probe
ttgggtgacagccagagggaggggagggcttttgttctgaagggttctcatgagactgaa

SEQ ID NO: 3652 - DNA, 60 bp, Artificial Sequence
  oligonucleotide probe
cctttcacctcctatatagtcaagatttttactaggctgtcaatgaaagtcaaccaataa

SEQ ID NO: 3653 - DNA, 60 bp, Artificial Sequence
  oligonucleotide probe
tgttcaaccagaagaccaaggcctccctttacctctccacaaataatgggaacatgtaca

SEQ ID NO: 3654 - DNA, 60 bp, Artificial Sequence
  oligonucleotide probe
atgatgtgcagtatatgatcttccacacacccttttgcaagatggtccagaaatccctgg

SEQ ID NO: 3655 - DNA, 60 bp, Artificial Sequence
  oligonucleotide probe
accatcattgacaagtccaaggctgtcaaaacagtgctcatggaactgttccaggattca

SEQ ID NO: 3656 - DNA, 60 bp, Artificial Sequence
  oligonucleotide probe
cgaggtctggtcttgatttcttttttgggtttctttctaggaaaatgagaagtgcatgca

SEQ ID NO: 3657 - DNA, 60 bp, Artificial Sequence
  oligonucleotide probe
tcccagtatgcattttgttgctttagcagatgtgacatgacattgtcaaccacaaagttc

SEQ ID NO: 3658 - DNA, 60 bp, Artificial Sequence
  oligonucleotide probe
gacagtagtttgaagaatggacataaaggacgagcgatggattgtaaaattagtgtttta

SEQ ID NO: 3659 - DNA, 60 bp, Artificial Sequence
  oligonucleotide probe
ggctacaatagctcttaggtctatgtgataattgatgttctggaatagatggagtgatca

SEQ ID NO: 3660 - DNA, 60 bp, Artificial Sequence
  oligonucleotide probe
cctgtgtgtctgtggtactgataattctcttaataaatctcttaccccaaaagacaaaaa

SEQ ID NO: 3661 - DNA, 60 bp, Artificial Sequence
  oligonucleotide probe
tcctatagtggatgtaaagggaggctcaaccttgtaactgctcagaattaaacgactgcc

SEQ ID NO: 3662 - DNA, 60 bp, Artificial Sequence
  oligonucleotide probe
ccaaaccagtccttcccaattataaaaacatttgacatcattctgaacatccaaactttg

SEQ ID NO: 3663 - DNA, 60 bp, Artificial Sequence
  oligonucleotide probe
ggctatttacatcatctatgttcttgtgataatcatgtctctcaaaagatatggacgcta

SEQ ID NO: 3664 - DNA, 60 bp, Artificial Sequence
  oligonucleotide probe
cctatgtaatataggacaaaggtgaccgatttcatcaagtttggagtcaattctaacaat

SEQ ID NO: 3665 - DNA, 60 bp, Artificial Sequence
  oligonucleotide probe
gaaagaagaaaactcacctgtgtgaagaaatggtatctgctttcaataaaactgagaaca

SEQ ID NO: 3666 - DNA, 60 bp, Artificial Sequence
  oligonucleotide probe
aatgtgtgggtatgtaagaatgcttgtaaacactggaaagtctgttgtggttatctgcag

SEQ ID NO: 3667 - DNA, 60 bp, Artificial Sequence
  oligonucleotide probe
tttttgaatatttttggggttttgtcggtgtctggggacgtcttgtacaaccagggcatg

SEQ ID NO: 3668 - DNA, 60 bp, Artificial Sequence
  oligonucleotide probe
gctgtacagatctctgtctttcagtgacacacatgcattttatatcaaaatctcatttca

SEQ ID NO: 3669 - DNA, 60 bp, Artificial Sequence
  oligonucleotide probe
ggattgattcttgggaccaaaaagagactagggagagaaagcacattagcaggtcaacca

SEQ ID NO: 3670 - DNA, 60 bp, Artificial Sequence
  oligonucleotide probe
tcaactcaaccgtggctgatcatcgcatcgtttgaatgaactgtcaaagttaatgtcccc

SEQ ID NO: 3671 - DNA, 60 bp, Artificial Sequence
  oligonucleotide probe
ctcacagtgcggttctttattttaggaaaagagtccttctatgacacgttccacaatgtg

SEQ ID NO: 3672 - DNA, 60 bp, Artificial Sequence
  oligonucleotide probe
ctgcaagaccagatgtgatgatcatattttaccagcaaaactgactcttgtgtgtttccc

SEQ ID NO: 3673 - DNA, 60 bp, Artificial Sequence
  oligonucleotide probe
cacactgagcgtggattattaactgtaagcgatactactttgtataaccaataaaacaga

SEQ ID NO: 3674 - DNA, 60 bp, Artificial Sequence
  oligonucleotide probe
gttgtactttggtttactcttaagtagtaatgactctgctaacaagagtaaacaaacctc

SEQ ID NO: 3675 - DNA, 60 bp, Artificial Sequence
  oligonucleotide probe
tgttttctatagggaagcaaatgtctttacctctgacacccgtgagtagggagaggaaca

SEQ ID NO: 3676 - DNA, 60 bp, Artificial Sequence
  oligonucleotide probe
tttgaaatgtctatgtaggaaggagagaacccagagtcactgtgagttcaagtccaaggg

SEQ ID NO: 3677 - DNA, 60 bp, Artificial Sequence
  oligonucleotide probe
agtatacaatgattcctggatgaggagatggaatgagagcaaatgagccggcatcacaga

SEQ ID NO: 3678 - DNA, 60 bp, Artificial Sequence
  oligonucleotide probe
attcagaagtttcctggcatcaactacccagtcctgactccaaacatgaaaggctttgag

SEQ ID NO: 3679 - DNA, 60 bp, Artificial Sequence
  oligonucleotide probe
gtgaacctccagaaacttctagaagctggggacttcatctgtcaagcccttaacagaaaa

SEQ ID NO: 3680 - DNA, 60 bp, Artificial Sequence
  oligonucleotide probe
tgaactgtgctcagggatgagctttgctcatttttgtatccttccgttctagcccagtat

SEQ ID NO: 3681 - DNA, 60 bp, Artificial Sequence
  oligonucleotide probe
tctgcaaagtgccaaactcctgatgcaaatggtttctcattaaagtatctcatcaaaaaa

SEQ ID NO: 3682 - DNA, 60 bp, Artificial Sequence
  oligonucleotide probe
agtgaaagaattcatcaaatgtcccatcaaatgttccagaagtttcaaatctcagccaag

SEQ ID NO: 3683 - DNA, 60 bp, Artificial Sequence
  oligonucleotide probe
ttccgaaagtgggtcatatgaagcgaattctccagggaattaaagagcttgaacggaacc
